United States Patent Application Publication US 2026/0242817 A1 - sequence listing, part 6

SEQ ID NO: 20532 - protein, 1085 aa, Zea mays
  VARIANT 597..1085: note = Derived polymorphism lacks residues 597 to 1085
  VARIANT 587..1085: note = Derived polymorphism lacks residues 587 to 1085
  VARIANT 575..1085: note = Derived polymorphism lacks residues 575 to 1085
  VARIANT 538..1085: note = Derived polymorphism lacks residues 538 to 1085
  VARIANT 531..1085: note = Derived polymorphism lacks residues 531 to 1085
  VARIANT 467..1085: note = Derived polymorphism lacks residues 467 to 1085
  VARIANT 391..1085: note = Derived polymorphism lacks residues 391 to 1085
MAGTEAFEAYFRRADLDQDGRISGQEAVAFFQGANLPQQVLAQVWMHADRNKTGFLGRPEFFNALRLVTVAQSGRQLTPDIVQSALYGPAAARIPAPKIAAGAVPPQMGAAGAPRPQGSAAMTPTPGQVGAAQMNPAATPRPQGSGMVPTSTQVSVPQVNPGAAPRPQGINSTMPAASQGGALQATQFAGPRVMQPQPSNLGITQQQPSSTGFMHPPQVGAPAASLQAQAPGINQGLVSGGSMGGSVGWQGWQGGNAASVGGIPQAIPGAAPSQAAQGGFGPGLPRTIGVALVQQVQAMSPSPLPPQSNSAGLPQDSKALVMSGNGPAISSGSSTDIFSALTQQKPSISAPAPQTSSIPSSSSFMPTPTGSQNLTNLTQFGSLQGSSQRQQTQPVVKPSPAPAAPVVSAGISNPSPQWPKITQSDIQKYMKVFGDVDRDRDGKITGAEARTLFLSWRLPREVLKQVWDLSDQDNDGMLSLREFCVALYLMERHRAGTPLPPALPDSLRHDETLLRATGLPSTAYNGPSWQQNQGGLSQRGPGAPGVPAGGVRPPLPPHLHSQTDGASRPGQPRSYMSGMDNHVVVQGNKDDKSGVNQSVQEVADPKKVEVEKQVLDSREKLEYYRTKMQDLVLYKSRCDNRLNEITERASSDKREVESLAKKYEEKYKQVAELASKLAVEEAAYRDVQERKVELNDALIKMVQGGSVDGLLQVRADRIQYQLEEMEKALSERCKHFGLQFKSSASVELPSGWEPGPQEGLIEWDEDWDKFEDEGFSIVKDNGTIQENPISAENGKVPSLWDDGDDMSPVASSNGHIKEERRYSVGDQVAESEIAYDFGDESVRSPGSAGRSASGSPFKSSRFGMHDSSPSKRESYSDHGGSESVFGDKFGDETSWNFDDQDTDSVWGSTALNAVRRRTNTVAVAHITLSLGPRQALQVALVYLERRGVRSLMILSQVPLHTHLGSLQNSVKAVMIAPLIALGSLIPSDPKTLGSSPRKVVSPGLTPLAAPKARMYQDSIQGIAQEILVGLTLSMTPIRSVRADLLKHLEAGLHPSSDTFSALSRDFCVLRPADLSIQGSDSLSEL

SEQ ID NO: 20533 - protein, 374 aa, Zea mays
  VARIANT 97..374: note = Derived polymorphism lacks residues 97 to 374
MGLGCFGCFAPEVDEDLKPSKPDDSSGTDARRKVAPDVANGYAHSFTFKDLLVATGYFNHANFIGEGGFGKVYKGKINGQMVAVKQLTQDGVQGRNEFLVEVLMLTMLNHRNLVSLVGFCAQGDERLLVYDYMPFGSLESHLFDVPLGKKPLDWNTRVRIAVGVAEGLSYLHNVADPPVIYRDMKAANILLGEDFSPRLSDFGLAKVGPVGDRTHVSTRVMGTYGYCAPDYVVSGKLTMKSDIYSFGVLLLELITGRRIYDASRPKPEQSLLTWSRPFLHDKRKFHRLADPSLLGCYPSSALNQLVVISIMCLQDQPHVRPIISDVVIGLNHVASQPCTAERTLPACMTSPPSSGSPQLVSTPARRRGGRLIGQ

SEQ ID NO: 20534 - protein, 408 aa, Zea mays
  VARIANT 83: note = Ancestral polymorphism is T, Derived polymorphism is M
  VARIANT 95..408: note = Derived polymorphism lacks residues 95 to 408
  VARIANT 96: note = Ancestral polymorphism is P, Derived polymorphism is L
  VARIANT 104: note = Ancestral polymorphism is G, Derived polymorphism is D
  VARIANT 108: note = Ancestral polymorphism is V, Derived polymorphism is D
  VARIANT 140..408: note = Derived polymorphism lacks residues 140 to 408
  VARIANT 145..408: note = Derived polymorphism lacks residues 145 to 408
MGNCCCGSADAGTKPPGRRPTPTKGTPPKGTTAWAPAPKPKPSDDGSSGAKQREMGGDDDDGAPGPGPVVGRVLQAPRLREFTLAELRAATRGFKPEMVLGEGGFGRVYKGWVDERTLNPAKSNAGVIVAVKKLNPESVQGLQEWQSEVNFLGRLWHPNLVRLLGYCGEDRELLLVYEFMSKGSLENHLFRSRGGNLEALSWSRRLKIATGAARGLAFLHSSEKQVIYRDFKASNILLDSDFTAKLSDFGLAKNGPSAGKSHVTTRIIGTYGYAAPEYVATGHLYVKSDVYGFGVVLLELLTGMRAHDPNRPSHQHNLVEWARPYLSGAGSKLKTLMDQRIDGQYHTKAALRAARLAGKCLTGDPKSRPSMDDVVAALEDIEALQQQAAGGHRDLPPRPGARRSAAVP

SEQ ID NO: 20535 - protein, 274 aa, Zea mays
  VARIANT 15: note = Ancestral polymorphism is Q, Derived polymorphism is H
  VARIANT 16: note = Ancestral polymorphism is L, Derived polymorphism is P
  VARIANT 27: note = Ancestral polymorphism is C, Derived polymorphism is W
  VARIANT 28: note = Ancestral polymorphism is D, Derived polymorphism is N
  VARIANT 71: note = Ancestral polymorphism is A, Derived polymorphism is V
  VARIANT 75: note = Ancestral polymorphism is A, Derived polymorphism is G
  VARIANT 110: note = Ancestral polymorphism is R, Derived polymorphism is G
  VARIANT 131: note = Ancestral polymorphism is R, Derived polymorphism is L
  VARIANT 171: note = Ancestral polymorphism is L, Derived polymorphism is R
  VARIANT 203: note = Ancestral polymorphism is D, Derived polymorphism is H
MAVPVGRLAASTLLQLLVWLPLPASACDRCVRHSKAAYYYTSSLTLAGGSCGYGTEAASFSAGLLAAAGPALYRGGAGCGACFQVRCKDRKLCGAAGARVVVTDRARTNGTDLVLSSTAFAAMARPGMARRLAGLRAVDIEYKRVPCEYKHRNLSVRVQEKRRSPGGPGDLAIRFLYQGGQTDIVAVDVAQVGSSNWKSMTRHSGGPAWSTRQAPAGPLQLRVVVTGGYDGKWVWAEREVLPRRRRAGEVYDTGVQITDVALEGCFPCDTREWE

SEQ ID NO: 20536 - protein, 310 aa, Zea mays
  VARIANT 267: note = Ancestral polymorphism is P, Derived polymorphism is R
  VARIANT 197: note = Ancestral polymorphism is G, Derived polymorphism is A
  VARIANT 116..310: note = Derived polymorphism lacks residues 116 to 310
MAAAAGGGAVRALSQKEQDIQMMLAADVHLGTKNCDFQMERYAFKRRTDGIYIINLGKTWEKLQLAARVIVAIENPQDIIVQSARPYGQRAVLKFAQYTGAHAIAGRHTPGTFTNQLQTSFSEPRLLILTDPRTDHQPIKESALGNIPTIAFCDTDSPMRYVDIGIPANNKGRNSIGCLFWLLARMVLQMRGTILPGHKWEVMVDLFFYRDPEEAKEQEEEAAVAPEFAAITDYQGADQWGGDQWTSDVTAPPVAPTGADWGAAPAPVPTGDGWDQAGAPAPVVDGTVPPLVAPTGWDQAAPPPTAQGWE

SEQ ID NO: 20537 - protein, 317 aa, Zea mays
  VARIANT 124: note = Ancestral polymorphism is Y, Derived polymorphism is C
  VARIANT 57: note = Ancestral polymorphism is P, Derived polymorphism is S
MAMTAGAPSMEVEQDLPGFRFHPTEEELLGFYLSRVVHGKQLHFDIIGTLNIYRHDPWDLPAMAKIGEREWYFFVPRDRKAGSGGRPNRTTERGFWKATGSDRAIRSSADAKRVIGLRKTLVFYQGRAPRGTKTDWVMNEYRLPDHAAAAAPPPKEDMVLCKIYRKATPLKELEQRASTMEEMQRRSDAAEAASASLVQAVGSADDNYLSSGDTHDISVLQIPASSSPAPSGDSYGGPALREAQTEAADATTVTVASASLVHAACMAGPAARHGDLPTPQVPTHLGVADWTQMQDPFMLRSLWQDQLFFSPLAHLLY

SEQ ID NO: 20538 - protein, 118 aa, Zea mays
  VARIANT 3: note = Ancestral polymorphism is E, Derived polymorphism is G
  VARIANT 9: note = Ancestral polymorphism is T, Derived polymorphism is M
MAGRLVPSTKKAMEHREEKPKVPSSDPGSDLDLVQLVAGQQPPNISEMKPLTREAYGGGMYAAEEEGGRRRGPARPRASATQSADGPEEQRAGARPSHPPPPSTGDRDLDITGQSYIQ

SEQ ID NO: 20539 - protein, 640 aa, Zea mays
  VARIANT 51: note = Ancestral polymorphism is R, Derived polymorphism is L
MPPPLPPDPIEPCAPAPAMDVALPAAVVATILSRLDVRSLLLAAAACRGLRACASHALVFLPSFHLLEVALTHELLRPLLPPNPSLRSLRLDCARLEDAAIACLARAGLHELLLLNCDNISGRLLCELGTTCRDLRVLSLNSLGARRGLVVNFSDLQELLNGCSQLENLRLALDFSTFDDPNFGRVWASASERLSSLEIGYIPMTMLLELLVAVTEGQQCMDYVKTPVFFPSLQKLCLAVDFITDHLIGSISVALPSLTHLDLQDAPIVEPNSSSDLTNAGLQQINPHGKLKHISLMRSQEFLVTSFRRVNDLGILLMADRCSNLESVCLGGFSRVTDTGFRAIIHSCSGLHKLRVSHGSHLTDLVFHDIIATSLCLTHVSLRWCKLLTNVGIERLSCNKDLNVLDLRDCRSLGDEAVRALSCLPKLQTLTLDATDISDQSLKYLGLGTCPLTSLSLRGCRKLTNDCITLLFAGHVKQSLQMLDLSRIPSITDDGIMLLARSRTPLIELRMRENPKIGDASVMALASMQIDGGTYGSTLQLLDLFDCGGITPLAARWFKKPYFPRLRWLGITGSLNRVMVDALSRSRPFLHMACRGEELGTMLWDTSSDWYRHNDDDLDELEQWLLEGEPVSDDDTIMEE

SEQ ID NO: 20540 - protein, 370 aa, Zea mays
  VARIANT 23..370: note = Derived polymorphism lacks residues 23 to 370
MEAATMVWTAAVVGAGLVYWFVWVMGAAEVKGKRAVDLKMGSITRDKVQDKYTQYWSFFRRPKETATTAASAEKVPAFVDTFYNLVTDIYEWGWGQSFHFSPSLPGRSHRDATRVHEERVADLLGARPGHRLLDVGCGVGGPMRAIAAHSGSNVVGITINEYQVNRARAHNRKAGLDSPRCEVVCGNFLSMPFPDASFDGAYSIEATCHAPRLQDVYGEVYRVLKPGGLYVSYEWVTTPLYRAEDPDHVECIHGIERGDALPGLRRQDEIASIAKEVGFEVLKEQDLALPPALPWWTRLKMGRIAYWRNSLVVRVLTMLRVAPKGVSEVHEMLYETAQHLTRGGETGIFTPMHMVLLRKPAAAASTEEAN

SEQ ID NO: 20541 - protein, 417 aa, Zea mays
  VARIANT 140: note = Ancestral polymorphism is W, Derived polymorphism is L
  VARIANT 159: note = Ancestral polymorphism is C, Derived polymorphism is Y
  VARIANT 189..417: note = Derived polymorphism lacks residues 189 to 417
  VARIANT 230..417: note = Derived polymorphism lacks residues 230 to 417
MLAAVMDYFSTCWGPRSRAGHRGKGSDAAGRQDGLLWYKDAGQLVTGGFSMAVVQANQLLEDQSQVESGSLSLADYGPQGTFVGVYDGHGGPETSRFINDHLFNHLRRFATEHKSMSADVIRKAFQETEEGFLSLVIKEWSFKPQIASVGSCCLVGVICAGTLYVANLGDSRAVLGRLVKATGEVLATQLSAEHNACYEEVRQELQSSHPDDPRIVVLKHNVWRVKGLIQSYQDTSGDITYEGRSCLQISRSIGDVYLKKPEYNREPLHSKFRLRETFQKPILSSEPQITEHRIQPNDQFVIFASDGLWEHLSNQEAVDLVQSSPRNGIARRLVKAAMQEAAKKREMRYSDLKKIDRGVRRHFHDDITVVVVFLDSDAMSKASWSKSPSVSLRGGGVTLPAKSLAPFSAPAQLNGTH

SEQ ID NO: 20542 - protein, 276 aa, Zea mays
  VARIANT 98..276: note = Derived polymorphism lacks residues 98 to 276
MATATTLSFSGGGGGTTLLRGHVALTSGRCCTFPSSRWRPPRLSASRADDSSPAPFEMTVEDALKLLGVAEGASFDEILRAKNAVLASCKDDQDAVAQVEAAYDMLLMQSLSQRRAGKVANNRIRFADVKPVKSAGAGTVPQWMQATMKNAPITFETPSSSSLGIQSCVYGALMVFTYASGSSTSLPSAYSSPDVPGFILATGFGASLYFLAKKNMNLGKAALVTVGGLAAGATVGSALENFLQVDLVPFLGIHSPAVVVSEFILFSQLLVSLFVR

SEQ ID NO: 20543 - protein, 976 aa, Zea mays
  VARIANT 482..976: note = Derived polymorphism lacks residues 482 to 976
MSRKIYGENDSERIASDGTAARTRPLSIKDIMLRREKKAASESKKAKEGLENGKDKSTHLERGRDHKSRKDPRDMPVEGSRKEKNRDATREGAKKEKPRHIPREYSRKEDMRYAPKEVPKDNSRDRSNTDAKMDDLKDAPNVPEKESLRDAPRKASKKRRPSGDDNHSGSKDKGIHHSQKLSTSMSGRADESKTRTLSEIRERKGDVMRSEYQKEPGKRWNDEINDDDKLKFKSEKLRNETKRKDRSFDNERSLEVGPVLKRHDSARFQDSKHSDRNAGRNEYATPYHGESELKRRRSRSRDHDRERYSRSISPPLREQRYNYRGRDFGNPPYYSMEKSRGKYAEVDKQRSSGSGGYIGGLHQRYESRLGGYSPRKKKTSLQAEQATTKTPSKVIQSPEKKSATWDQPPVKANQSNFPTTFLPTVGQMAPTPFSFSVIKDPSTTAVTMLAGNSLTADSVQLTQATRPLRRLHIENLPDSATEDKLIDCLNDFLLSTGSKLQRSKPCLSCTINREKRQAFVEFLTPEDATAAISFDGRSLNGSVLRIRRPKEYVETVNVTPKKAEETALISDVVADSPYKIFIAGIAGVISSKMLMEIVSAFGPLAAYRFLFNNELGGPCAFLEYADRSVTSKACAGLNGMMLGGRVLTAVHVFPNPHVEAANEASPFYGIPDNAKLLLKEPTKVLQLKNVFEREEYMLLSKSELEETLEDVRVECTSMDKIHRFGAVKSVNVVEYPAAGVSAAEENIVELKIECTEFSDTENIAKAVSEYSVPIIPSIDVLNHSVASDTKDVDLIPESQDQKDKHLPSNAALCESEAPVADEDAELDETQSRAALPTPQHAEADHTEAAVDENKHTGAGKVTATATDDDAVEKSHGDPRTSETCNPAGPTDKAEKPGRYSEQGAGDVTEDRPEKEAQAVGTSDTGFVFEPGSVLVEFLREEAACMAAHSLHGRRFGNRTVHAGYAPYDLYLQKYPR

SEQ ID NO: 20544 - protein, 140 aa, Zea mays; identical to SEQ ID NO: 10262
  VARIANT 48: note = Ancestral polymorphism is R, Derived polymorphism is S

SEQ ID NO: 20545 - protein, 543 aa, Zea mays
  VARIANT 328: note = Ancestral polymorphism is F, Derived polymorphism is L
MEPFFLFIELALVLCFITLYYRHLQSKKTSPLEPTEWPVVGHLPGLVANIHRFHDWATGVLAGVGCNFEARGGRTGLRYFITCDPSNVRHIFTSNFANYPKGEEYAAIFDVLGGGIFNADGESWRRQRVKAQMLMTGPRFRAFTARCSRDKVERSLLPFLAHHAAADDEGRPTPCDLHDVFLRLTFDMTCALVFGVDPGCLALGLPGVPFARAMDDALETLFLRHITPTACWKLMSVLGVGQEKKMAAARRTIDCFVATTVAKRRADMLREGEGEGVCSSFDLLSSFICHEDDSSENDDDDDVFLRDTTVNLLLAGRDTTGAALSWFFYLVSKNPRVEQKLLDELAPIVASRRRAGGAAADAASGMVTFDADELGSGLVYLHAALSECLRLYPSVPFEHKVAAAADVLPSGKELKAGDKVLVFNYSMGRMEGVWGKDCTEFRPERWLNEDGTKLRYEPSYKFISFNAGPRTCLGKEMAFVQMKAVAAAVLWNFAVEVVPGHVVEPKLSIILHMKNGLAVKVRRRDGTYGAAPPSSVTPCFSEF

SEQ ID NO: 20546 - protein, 715 aa, Zea mays
  VARIANT 503..715: note = Derived polymorphism lacks residues 503 to 715
  VARIANT 450..715: note = Derived polymorphism lacks residues 450 to 715
  VARIANT 435..715: note = Derived polymorphism lacks residues 435 to 715
  VARIANT 134..715: note = Derived polymorphism lacks residues 134 to 715
  VARIANT 109: note = Ancestral polymorphism is R, Derived polymorphism is W
  VARIANT 18: note = Ancestral polymorphism is C, Derived polymorphism is Y
MEATLAFSQDSPPISIICAAKFVGLPLTIDPSLASGLAPTLRFASGESLHGVNPILLYIASGATIPCFSGKNDIEFGHVVEWLEYVPIFLSGSEFENACLFVDGFLASRTFLVGHGLTIADIVVWSNLAGIGQRWESLRKSKKYQNLVRWFNSIDSEYSDTLNEVLAAYVGKRGIGKSPAPSLKEKVHVSKDPSAPEVDLPGAKVGKVCVRFAPEPSGYLHIGHAKAGLLNKYFAERYQGRLIVRFDDTNPSKESNEFVENVLKDIETLGIKYDAVTYTSDYFPKLMEMAGSLIKQGKAYIDDTPKEQMRKERMDGIESRCRNSTVEENLSLWNEMVNGTERGMQCCVRGKLDMQDPNKSLRDPVYYRCNIDPHHRVGSKYKVYPTYDFACPFVDALEGVTHALRSSEYHDRNAQYYRILQDMGLRRVEIYEFSRLNMVYTLLSKRKLLWFVQNKKVEDWTDPRFPTVQGIVRRGLKIEALIQFILQQGASKNLNLMEWDKLWTINKKIIDPLCARHTAVLKDQRVIFTLTNGPEKPFVRILPRHKKFVGAGKKATTFANRIWLDYADAAAISKGEEVTLMDWGNAIVKEIKVESGVITELVGELHLEGSVKTTKLKITWLADIEELVPLSLVEFDYLISKKKLEEDDDFLENLNPCTRRENPALGDANMMNLKRGEIIQLERKGYYRCDAPFIRSLKPVVLFAIPDGRQQALLN

SEQ ID NO: 20547 - protein, 550 aa, Zea mays
  VARIANT 453: note = Ancestral polymorphism is E, Derived polymorphism is V
  VARIANT 104..550: note = Derived polymorphism lacks residues 104 to 550
MGTEAEQPDMDSHRNDGVVVVPAPRPRKGLASWALDLLESLAVRLGHDKTKPLHWLSGNFAPVVEETPPAPNLSVRGHLPECLNGEFVRVGPNPKFAPVAGYHWFDGDGMIHAMRIKDGKATYVSRYVKTARLKQEEYFGGAKFMKIGDLKGFFGLFMVQMQQLRKKFKVLDFTYGFGTANTALIYHHGKLMALSEADKPYVVKVLEDGDLQTLGLLDYDKRLKHSFTAHPKVDPFTDEMFTFGYSHEPPYCTYRVINKEGAMLDPVPITIPESVMMHDFAITENYSIFMDLPLLFRPKEMVKNGEFIYKFDPTKKGRFGILPRYAKDDKLIRWFQLPNCFIFHNANAWEEGDEVVLITCRLENPDLDKVNGYQSDKLENFGNELYEMRFNMKTGAASQKQLSVSAVDFPRVNESYTGRKQRYVYCTILDSIAKVTGIIKFDLHAEPESGVKELEVGGNVQGIYDLGPGRFGSEAIFVPKHPGVSGEEDDGYLIFFVHDENTGKSEVNVIDAKTMSADPVAVVELPNRVPYGFHAFFVTEDQLARQAEGQ

SEQ ID NO: 20548 - protein, 96 aa, Zea mays
  VARIANT 79: note = Ancestral polymorphism is M, Derived polymorphism is I
MDGVTQAVENLPRLNGSAQDALQLLKSLQFQLDLLAQQLPTFDEVQSGQATLKSWDEQYKKPLLSQTSDCVHCLSTFLIVTVGNHFLKIKGHIAPL

SEQ ID NO: 20549 - protein, 269 aa, Zea mays
  VARIANT 112: note = Ancestral polymorphism is Q, Derived polymorphism is P
MNIFQGMHQTTLMLKQLDLHMISQMVYILCVSSIKEPLISTWLPQLQCVGHTVIIIEEMGTRAYQEQVATHIFWCSQQTSALSQETCNTQQEQIQTFQKQLAVATEKLKDLQSLAKFMFKATGNAVNLVQIVGMKVPHVQQAFTWDYGLACVLMVLRTLGIDCCDDIADLERLCRTTSIWTVDLAYLLNKISVSFPFCTVTLGANPQYSAESFCREQLQEDIDRVDELFGKALDAGISIQATQPLEGCQYVGIHSIRIVCAFFWVSSKH

SEQ ID NO: 20550 - protein, 164 aa, Zea mays
  VARIANT 82: note = Ancestral polymorphism is G, Derived polymorphism is C
MPAGHGLRSRTRDLFARPFRKKGYIPLTTYLRTYKIGDYVDVKVNGAVHKGMPHKFYHGRTGSVWNVTKRAIGVEINKQVNGRIIRKRIHVRVEHVQPSRCTEEFRLRKAKNDQLKADAKARGEVISTKRQPVGPKPGFMVEGATLETVTPIPYDVVNDLKGGY

SEQ ID NO: 20551 - protein, 269 aa, Zea mays
  VARIANT 6: note = Ancestral polymorphism is I, Derived polymorphism is S
MTVVSIMWSLVQVQVLVAVALAFLVGGAWCGPPKVPPGKNITAKYGSDWLDAKATWYGKPTGAGPDDNGGGCGYKDVNKAPFNSMGACGNVPIFKDGLGCGSCFEIKCDKPAECSGKPVVVYITDMNYEPIAAYHFDLAGTAFGAMAKKGEEEKLRKAGIIDMQFRRVKCKYGSKVTFHLEKGCNPNYLALLVKYVDGDGDIVAVDIKEKGSDTYEPLKHSWGAIWRKDSDKPIKGPITVQLTTEGGTKTVYDDVIPAGWKPNTAYTAK

SEQ ID NO: 20552 - protein, 249 aa, Zea mays
  VARIANT 117: note = Ancestral polymorphism is E, Derived polymorphism is G
  VARIANT 149: note = Ancestral polymorphism is P, Derived polymorphism is L
  VARIANT 186..249: note = Derived polymorphism lacks residues 186 to 249
MGFLEDFQASVEALPSMLHRNYSLMRELDKSLHGVQLENEQRCQQEIEDIKHGLESGSITYDPAKLKFSEEAMEEQKHCVRIADEKVALATQTYDLVDAHIQQLDQFMRKLEEIRQGKEAAAAVTAGTAVATTATPTVNAGATTADANPKSGRSGERGRGGRKKAKVPTEQSVPVPVPLPPIDLELPVDPNEPTYCLCNQVSYGEMVACDNPNCKIEWYHYGCVGVKEQPKGKWYCPNCIGFQKKRKGK

SEQ ID NO: 20553 - protein, 536 aa, Zea mays
  VARIANT 28: note = Ancestral polymorphism is Q, Derived polymorphism is K
  VARIANT 147: note = Ancestral polymorphism is G, Derived polymorphism is R
MKRSAANTIVQLVRHILRFPPSNPILPKLSSSWSFCCFTLAKSARKAGGGARSRRAVGVEAAAAKVLPRLRILAVLAVVAWTFFLYYVHFTVISSSTVEVGNGDEDGGAADPCRGRYVYMHDLPPRFNADIVRDCRKTEDHWGDMCGFVSNAGLGRPLAADDDGVITGEAGWYGTHQFALDAIFHNRMKQYECLTNHSAVASAVFVPFYAGFDFARYHWGYDNATRDAASADLMEWLMARPQWRRKWGHDHFLVAGRTGWDFRRSSNVNPDWGTDLLDMPAGRNMTVLVLESTLKYTSDFSVPYPTYFHPRSDADVLRWQDRVRGRRRTWLMAFVGAPRPDVPMSIRIRDHVIAQCRASSACAMLGCARTLGSTQCHTPASIMRLFQKSVFCLQPPGDSCTRRSVFDSMVAGCIPVFFHTGSAYEQYPWHLPRDDGHLRYSVFIPDADVRRRNVSVEAVLRAIPPPTVERMRQEVIRLIPTLLYADPRSKLETLKDAVDVAIDGILDTMAGTKDTPSLFAAIFSRFRHKGSWKAAR

SEQ ID NO: 20554 - protein, 579 aa, Zea mays
  VARIANT 37..579: note = Derived polymorphism lacks residues 37 to 579
  VARIANT 151: note = Ancestral polymorphism is C, Derived polymorphism is W
  VARIANT 175..579: note = Derived polymorphism lacks residues 175 to 579
  VARIANT 222: note = Ancestral polymorphism is W, Derived polymorphism is L
  VARIANT 259: note = Ancestral polymorphism is G, Derived polymorphism is W
  VARIANT 351: note = Ancestral polymorphism is G, Derived polymorphism is W
MRRRPVLPSHHDDTDKGGGKPAPARLCFLATLCAMFWVLIFYFHFAVLSDEPAAEARIARAHTRVPEQDGAGAGASRVDLPRAEEPEDERAAGVRREVAPASYPFERALRTAENKSDPCGGRYIYVHHLPPRFNEDMLRECEKLSVWTNMCRFITNDGLGPPLGNDEGVFSETGWYGTNQFSVDVVFGNRMKQYECLTEDSSVAAAVFVPFYAGFDVARYLWGYNITTRDAASLDLVEWLMKKPEWSVMGGRDHFLVAGRITWDFRRLTEEESDWGSKLLFLPAARNMSMLVVESSPWNSNDFGIPYPTYFHPGKDAEVFLWQDRMRSLERPWLFSFAGAPRPGDPMSIRGQLIDQCRVSSVCKLLECDLGESKCHSPSTVMKMFQSSLFCLQPQGDSYTRRSAFDSMLAGCIPVFFHPGSAYVQYTWHLPKNYTRYSLFIPEDDIRSRNASIEERLKSVHPDVVKQMREDVINLIPKVIYADPRSKLETLKDAFDVSIEAIINKVTKLRRDIIAGQEDKGFVEENSWKYSLLEDGQRTIGPHEWDPFFSKPKDKGGDSGGPSAEAAKNSWKSEQRGHN

SEQ ID NO: 20555 - protein, 1047 aa, Zea mays
  VARIANT 771..1047: note = Derived polymorphism lacks residues 771 to 1047
  VARIANT 73..1047: note = Derived polymorphism lacks residues 73 to 1047
MASATPMLGSTARLLFPLSFSLALLLLCCSAVCNAAGNDDESTALLAIKASLVDPLGKLAGWNPASASSHCTWDGVRCNARGAVAGLNLAGMNLSGTIPDAILGLTGLTSVVLQSNAFGHELPLALVSVPTLRELDVSDNSFDGHFPAGLGALASLAHLNASGNNFAGPLPPDIGNATALETLDFRGGYFSGTIPKSYGKLRKLRFLGLSGNNLGGALPAELFEMSALEQLIIGYNEFVGAIPAAIGNLANLQYLDLAIAKLEGPIPPELGGLSYLNTVFLYKNNIGGPIPKEIGNLTSLVMLDLSDNALTGTIPLELGQLANLQLLNLMCNRLKGGIPAAIGDLPKLEVLELWNNSLTGALPPSLGGAQPLQWLDVSTNALSGPVPAGLCDSGNLTKLILFNNVFTGPIPAGLTTCATLVRVRAHNNRLNGTVPAGLGRLPRLQRLELAGNELSGEIPDDLALSTSLSFIDLSHNQLRSALPSSILSIRTLQTFAAADNELTGGVPDEIGDCPSLSALDLSRNRLSGAIPASLASCQRLVSLNLRSNRFTGQIPGAIAMMSTLSVLDLSSNSFTGVIPSNFGGSPALEMLNLAYNNLTGPVPTTGLLRTINPDDLAGNPGLCGGVLPPCGASALRASSSESYGLRRSHVKHIAAGWAIGISVSIVACVVVFLGKQVYQRWYVNGRCCDEAVGEDGSGAWPWRLTAFQRLSFTSAEVLACIKEDNIVGMGGTGVVYRADMPRHHAVVAVKKLWRAAGCPDPEEAATADGRQDVEPGGEFAAEVKLLGRLRHRNVVRMLGYVSNNLDTMVLYEYMVNGSLWEALHGRGKGKMLVDWVSRYNVAVGVAAGLAYLHHDCRPPVIHRDIKSSNVLLDINMDAKIADFGLARVMARAEEPVPVSMVAGSYGYIAPECGCRLKVDQKSDIYSFGVVLMELLTGRRPVEPEYGESQDIVGWIRERLRSNSGVEELLDSGVGGRVDHVREEMLLVLRIAVLCTAKSPKDRPTMRDVVIMLGEAKPRRKSSSATVAATVVNKDRPVFTTSPDSSYL

SEQ ID NO: 20556 - protein, 1093 aa, Zea mays
  VARIANT 973..1093: note = Derived polymorphism lacks residues 973 to 1093
MEEEELTSGGGDAALLAPEPREQAAEEGRSPRDAEAFEDAVEEASAASTSPVACCNGDAAETSSPPAWKSQVDGPSAPEEAETYESPSASSSGCAAMEVESSLVSELREEPGRVDAGSAASPSGQRAGGTEEHENSMATPGAGSPSREETDSCMHSAPSSPPRSASSTSSPPRSASLTSSPPLPQIKQQSRHVRTGSFQRFREQMQRAWKWGPIGGGGGGERSPREQLLRTTVNIEAMANQKRHWYQVRSKSQDNWQYREPTSLFEHFFVVGLHSYADVGVVEDAFAKKKAWESNVARSEIVNLRKNQYRGPVPSMEPQILFKYPPGKRAEVREADLPSFCFPEGVKARLIERTPSMSDLNEVIFGQEHLSRDDLSFIFSLKVSDNAPLYGVCLHVQEIVQKAPGILGAVSPLNPTSYKPSRFLVSAPRCYCLLTKVPFFELHYEMLNSIIAQERLDRITQFASEITLAEPVPRPIKEQDGVDGDFDSSNGIPYIDWTEYAVPVNSISGLISSSSIPSERDMSSYLFRSWEPNSSQSISGSEISDSSYVREVEEARHSFQHYEDCIVENLEPRCDSFGRASYMYDNGHTSPDLLSMHSPASSRLERAQSVESLESSVKGATSDEEYEVNVKHEVIVDDEKVVGWAKAHNNEPLQIVCGYHALHLPPRGGELVFRPLEHLQPVKYSRPGLPLLGFGEEILDNALTRAEKNKINLHLVAAEEALALSIWTMATVCRSLSLESVCCATPSFAVYKNSLFTGVLLEKQIVVICPNLGVLSAILLSIIPMIRPFQWQSLLLPILPRKLIDFLDAPVPFIAGVQHKPPDIKMKGSSLVRVNVQKDQAKHNCYLFFALSSLDCTANLFFYVKACSLPRLPHYKELVSNLGPLHARLSCENSLAKRHPIYKCNEVQADVAWKFLNIMRTYLESLCSDLRFHTITNVQSNNDRVSLLLKDSFIDSFPSNDRPFIKISGLSVWATRKVSIDKQILIDRVFLDGTHMMLSRYASLWRRRCFLFYQILDCPVSKMNGHKGIVPVEIKHSDTLCFGFGVCFLVLPLHVISNAQGIGKIKTRHVAWSAEDFDFAEATSLIRSVLKSI

SEQ ID NO: 20557 - protein, 87 aa, Zea mays
  VARIANT 34: note = Ancestral polymorphism is R, Derived polymorphism is H
  VARIANT 38: note = Ancestral polymorphism is E, Derived polymorphism is K
  VARIANT 50: note = Ancestral polymorphism is R, Derived polymorphism is H
  VARIANT 68: note = Ancestral polymorphism is R, Derived polymorphism is H
  VARIANT 69: note = Ancestral polymorphism is R, Derived polymorphism is H
MGQIQYSEKYFDDTYEYRHVVLPPEVAKLLPKNRLLSENEWRAIGVQQSRGWVHYAIHRPEPHIMLFRRPINYQQQQEAAAAQMLAK

SEQ ID NO: 20558 - protein, 193 aa, Zea mays
  VARIANT 6: note = Ancestral polymorphism is C, Derived polymorphism is W
MARMACRVALFATVLLCAAAGVALGAKRAPIPDDLRDVIDEEEDDEWRQYRVPSSRGPGRGDGPPPDLSRMDPAALQAELLRGQTGPSFGFVKLRPGTTRSREHVVGIARRWSNVLRTGSVDARFTAVNFVTLMFTMERGRDILELKEFVLSQAEAYELRIGDQVFRRPGDPPLDQVLRKPRKKKRRKSRDEL

SEQ ID NO: 20559 - protein, 183 aa, Zea mays
  VARIANT 51: note = Ancestral polymorphism is V, Derived polymorphism is I
MSSPSKRREMDLMKLMMSDYKVEMVNDGMQEFFVEFRGPNESIYQGGVWKIRVELPDAYPYKSPSIGFINKIYHPNVDEMSGSVCLDVINQTWSPMFDLVNVFEVFLPQLLLYPNPSDPLNGDAAALMMRDRPAYEQKVKEYCEKYAKPGDAGVTPEEQSSDEELSEDEDDSGDEEIMGKPDP

SEQ ID NO: 20560 - protein, 429 aa, Zea mays
  VARIANT 131: note = Ancestral polymorphism is P, Derived polymorphism is L
MDEDEQASQAEGDTDKTPEPPRCGRHPSQLLTGICSSCLMERLSSVRDPPEAEIVEVAAEGSSGAADRGRLRKTLMLLFQLDDSTGGGAARPSEGGTQSAESQSVSAGGGPGRGGKRRGPGSWLQSIRRLPRGALRWGRNAAASAREPSIPPRGVAVDLSPHGSGGAHAERKPSFRRSCEWTASRGPSRGSLPLQPPRHSWDGSMVGRAFACSFACLEEREPPDGATRSNAEEAVGETRAAAAESTNGGHSTDAGGDADERRLSGRRSCDTGTEMAVSGAGRRRSSRWSRVWDRSITSPLKEFVRKGEHVLERSLSESRREVRRGKNAEAADMGGETQPGRNGHVPGRASQGSIRSSQAASNVDVHSFRTDWLKNSKIGRSRSVHYTSPGNLDNGMLRFYLTPMRSSRTANRGRRRSSRLFARGLFGFI

SEQ ID NO: 20561 - protein, 157 aa, Zea mays
  VARIANT 48: note = Ancestral polymorphism is N, Derived polymorphism is I
  VARIANT 44: note = Ancestral polymorphism is V, Derived polymorphism is A
MGFVSFVGRVLFVAAFLLSAYQEFNEFGADGGPAAKALQPKFNVFVKNISAHLGVAVPHIELKHVIAATIALKGLGSLLFILSSSLGAYLLLLYLALITPIVHDFYNYDTEKEEFARLFAKFTQDVALVGALLVFLGMKNSIPKRQGKKKAHKAKTN

SEQ ID NO: 20562 - protein, 225 aa, Zea mays
  VARIANT 191: note = Ancestral polymorphism is G, Derived polymorphism is A
  VARIANT 190: note = Ancestral polymorphism is E, Derived polymorphism is K
  VARIANT 38: note = Ancestral polymorphism is E, Derived polymorphism is V
  VARIANT 37: note = Ancestral polymorphism is A, Derived polymorphism is T
  VARIANT 27: note = Ancestral polymorphism is P, Derived polymorphism is L
MAAAPCSTTFSGDVWAELRLASASDVPHIHRLIHQMAEFELLTDLFAATEELLTSTLFPSPTPPPFTSFTALILDLSPSPVAPDPSSTIASRRLDLSASPLADPEAAAFASPRGGGRVTAGFVICFPNYSTFLSKPGLYVEDIFVRAPWRRRGLGRMMLSAVAGRAAELGMGRVEWCVLDWNKNAIDFYEGMGADVLPQWRICRLAGKALDKYKGSAGGKAAAAE

SEQ ID NO: 20563 - protein, 410 aa, Zea mays
  VARIANT 283..410: note = Derived polymorphism lacks residues 283 to 410
  VARIANT 298..410: note = Derived polymorphism lacks residues 298 to 410
  VARIANT 309..410: note = Derived polymorphism lacks residues 309 to 410
MVSGAAHNPGGGAAAQTTQRSPPQLGARTALATPPPVSGGAAHSASTSGGTAGSPPSSRSEQHAPDGAVKGPALGTAPAAAAASTPASDSTFLRLNNLDINGDDAPSSQAPTRLATQTLVYSELLILVNSKKKRRGTRAVGPDKGNRGLRQFSMKEHPFFDTPVVLSFHIKVNSLEVADELVAEFTDPNNNIEAPDPDNPNAQQYDEKNIRRRVYDALNVLMAMDIISKDKKEIQWKGLPRTSISDIEELKTELVGLKGRIEKKSVYLQELQDQYVGLQNLIQRNEQLYGSGNTPSGGVALPFILVQTRPHATVEVEISEDMQLVHFDFNSTPFELHDDSYVLKEMRFCGREQHDGTQESISNGGESSNVSNIYWQQAQRMEMPNNGTVRLSSSPPIPGILKGRVKHEQH

SEQ ID NO: 20564 - protein, 442 aa, Zea mays
  VARIANT 4: note = Ancestral polymorphism is R, Derived polymorphism is C
  VARIANT 12: note = Ancestral polymorphism is L, Derived polymorphism is P
MDACLRLGFFLLLVAAAFAPLVSAQLSADFYKTSCPDAEKIILGVVEKRFKADPGTAAGLLRLVFHDCFANGCDASILIDPMSNQASEKEAGPNISVKGYDVIEEIKTELEKECPNVVSCADIISVSARDSVKLSGGPEYAVLLGRRDSLVSNREDADNLPGPDIAVPKLIDEFDKQGFNTEEMIAMLGGGHSIGVCRCFFIETDAAPIDEAFKKKISDACDGKDSGSVPMDSTSPNDMDGSYFGLVLEKKMPLTIDRLLGMDKTTEPIVKAMSDKTTDFVPIFAKAMEKLSALKVLTGKDGEIRKTCSEFNNPQNTSGSTSVIRISSIDADQMAGLSQPGSTSRKVGGRADVSTPTAVETPAMAATEAAAKVPGGVVVSAGDQDRSGSGPKLRGSGGPVVNPVPAAPGGAEEAAKQQEVTDLEEKKKRNMAKLRGAGQAKQ

SEQ ID NO: 20565 - protein, 239 aa, Zea mays
  VARIANT 65..239: note = Derived polymorphism lacks residues 65 to 239
MADSAALSTSLPRSLASRRPLSSPLHARARARSQRRCRLGSRSLHRLRARAGKDDPEDLYGPYPWDQPLDLTAGSADIQWVPEDRVTLFTSDGLIQIGGSLVPRRVSASEKRQRKLKSGQKLRRFQESSYMDPNQSLCLGALFNIAATNGLDMGRRLCIFGFCRSIEMLSDVVEDTVLEHGGEVVTAEKASSNGLQEKLTMSVAVPLLWGVPPASETLHVAVRSGGGIVDKIYWQWDLF

SEQ ID NO: 20566 - protein, 600 aa, Zea mays
  VARIANT 309: note = Ancestral polymorphism is F, Derived polymorphism is S
MDFDEYEYLEKTVEAFAAPANGSSPPGSGYKDKERSSRRRSTGGDEERDNVERRSKRSRPEEGRDRDRERHRYRDGDRHRSSRERRDRDRDVKEKEQGRENDKDRRSRDREREKEEREKDRQRRSRSRSERRRDDEERDRYRERDVRRRKEEVAEPEVDPERDQRTVFAYQLSLKADERDVYEFFSRAGKVRDVRLIMDRNSRRSKGVGYIEFYDAMSVPMAIALSGQLLLGQQVMVKPSEAEKNLVQSNASSGAASGGARKLYVGNLHSNINEDQLRQVFEPFGQVELVQLPLDPLSGLCKGFGFVQFARLEDAKAAQSLNGQLEIAGRVIKVSAVTDQAGMQVSGATGDLDDEEAGGLVGTECQFQSSSNAEIGPQRHYDQDSTTTTATLFPYISSLSRSFSMDLLQFFGDGELMMFESGHKRGILLQCPYHFDADFNDWLHKKLDLTGGTGIAGLTTPVAIPTVSVLGAAPAAAPLLHPTVPGLAIPGATLPITTPSIDLAPPSQCLLLKNMFDPALETDPDFDLDIRDDVQEECSKFGQLKHIFVDKSTAGFVYLRFDSITAAMSAQKALHGRWFAGKMITATFMTPQQYEMKFPS

SEQ ID NO: 20567 - protein, 740 aa, Zea mays
  VARIANT 336..740: note = Derived polymorphism lacks residues 336 to 740
MAAVATPPAPAPAAPAPAPAPAAAPAPVTVAPAADRILSELLPNHGSAAEVVAGFAAQGGGCDRACCCCRQGQKFSWLPILSMDHGLIEMICDSDSFACCLNQEGAVTSQPLSVAIPPERSITPVLQDFMDPNLFYLPAYYYGGYDSSMSEWDDYPRYLNSDGVEIAPAVYGDIYGYGYAPYGAYSPATSPVPTVDGQMFGAQHYQYPTTYFQPPTPIPSTTQSNLQSSNNPEKPAAKADPAKATANGVPNGTGHTHSYSGTVPSQQSSALTPDGTYRAPLLGGVPSAGYLDTTYYGYDSTGAQFAWYDGSAYANGQQRTTTTNRFPSSSFSGNGSSAIYQNKSSTTQQMGMQNRRPTTTSAAPTYPNRMYPSPRPYTQYGNSVKTGLPYGSNGYDSRIYGRCGLGNGMDNRYRPRACSGYYGYGNESQDGTIELNRGPRSGRFKNQKLYGHTVTIAVKGQSLPSSESKNDSAVPDRAKYNRDDFPVQYDAAKFFVIKSYSEDDIHKSVKYNVWASTTNGNKKLDAAYQEAQSKGSACPIFLFFSVNTSGQFVGVAEMTGAVDFEKTLEYWQQDKWNGSFSVKWHIVKDVPNNILKHIILENNENKPVTNSRDTQEIRLEQGLQMLKIFKDHVSKTSILDDFAFYESRQKLMQDKRSKQQQLQKQVWDTRTPVSVTGERPQEPANGKPNPSVPDGVTAEVKAVKAPAENGITAPVVSYAAKVAQTAPEKPVLSNGVAKTG

SEQ ID NO: 20568 - protein, 132 aa, Zea mays
  VARIANT 9: note = Ancestral polymorphism is Q, Derived polymorphism is K
  VARIANT 11: note = Ancestral polymorphism is E, Derived polymorphism is K
  VARIANT 29: note = Ancestral polymorphism is A, Derived polymorphism is S
  VARIANT 34: note = Ancestral polymorphism is G, Derived polymorphism is R
  VARIANT 95: note = Ancestral polymorphism is S, Derived polymorphism is I
  VARIANT 96: note = Ancestral polymorphism is S, Derived polymorphism is I
MMYGNMTNQHEAFLRRKLEEEQATELQQAIELEGRRFMGLQLLDLKSRGHHHLGSGAPMPMRQATDGKGSDSNGNDNASHLEDAISIIQDKRMMSSLAMNAPAADAEGEHEEQQGEGGGGCDKKMQCLSDAS

SEQ ID NO: 20569 - protein, 186 aa, Zea mays
  VARIANT 83: note = Ancestral polymorphism is S, Derived polymorphism is R
  VARIANT 118: note = Ancestral polymorphism is P, Derived polymorphism is L
METLLISEERNHQLHHFSGRRKKALAASPQSTRSYHAGNCRAFHSGITVGILPSPPAQRVALTRSSPEPKTPKHQLHHGKKRSRAISINLSTSPPSRPELWAGPGFCNSPPPSSLPIPKFSLHQKRSVSLEFPPADRSDDEEVPVHAKSAPSSPTAGSGVTFFSGTDATIATENLRRILNLKIEDN

SEQ ID NO: 20570 - protein, 973 aa, Zea mays
  VARIANT 372..973: note = Derived polymorphism lacks residues 372 to 973
  VARIANT 366..973: note = Derived polymorphism lacks residues 366 to 973
  VARIANT 230..973: note = Derived polymorphism lacks residues 230 to 973
MGHRRNYSDDEFSVASEKPEVEFMDFQNGDTFQDYSSEDTPVLVSAPFPFEHGKPKSVLVGETSADTIQIENTSPEPVNLWSVRIFSSNPEDSYVLSMMRPPSNGASEEEKQAFLALTSVEDRTLRPGQTLTVWLSCTPKDIGLHTSIVHVDIGNEKIERVAFLLADDNVSKSLFSDKPYSRRRVQVKKFEPSPFVPGCRPTQQHVQGYKHKLPQYAIPAHIRELIESKQTPDVLYDELSMINYAEYFSTLIVMEELNLEEEMRAYDMEGVLMRRRGMHFLSLEVPGLAERRPSLVQGDFIFARYAGNDSQPYQGFIHKVEADEIFLKFDHQFHMNHRERNQYHVSFTYNRVNMRRLYKSIDDAKYLGPGILFPHKSPYRVLKRLPFKPLDPYINTEQADAVASILACRGVPPYVIYGPPGTGKTMTIVEAVLQLYTGKKRANILICAASNTAADHVLEKLLQGSHPIRPRDIFRLNAPSRQYEDVNTDFIKFCFFQDLVFKCPPLQALVQYKIIISTYTSSYLLQAEGIRQGHFTHIFLDEAGQASEPEAMVPLSGLCGRDTVVVLAGDPKQLGPVVYCREAERCGLGTSYLERLLTGFEQYQTGNANYVTKLVRNYRCHPAILELPSELFYEGELIACKEGESSAYDCIGLPNKSFPVLFVGIQGCDEREGNNPSWFNRIEVSKVVSIIRNLTRGEDVHESDIGVITPYRQQVAKIKKALEAFEMPSFKVGSVEQFQGQEREVIIISTVRSTVKHNEFDKFFNLGFLSNHRRFNVAITRAKSLLVIIGNPYIITKDRHWDRLLRYCADNGSYQGCPLPPPESPYSDDARFFSKYDEDQGGPSGQDYSQEPAYCNYNQEPAYCNYDDQEPSDFGSGHDTGVAQPEPASENQESWSEELPEDESQPFSNPQADVEETPKQDGEEGAAAAQGDAQADQSLTNDDSQLQDAGAGKYTFPPGWCDVSSIPATGWGD

SEQ ID NO: 20571 - protein, 267 aa, Zea mays
  VARIANT 2: note = Ancestral polymorphism is A, Derived polymorphism is G
  VARIANT 15: note = Ancestral polymorphism is A, Derived polymorphism is D
  VARIANT 22: note = Ancestral polymorphism is R, Derived polymorphism is Q
  VARIANT 30: note = Ancestral polymorphism is D, Derived polymorphism is G
  VARIANT 32: note = Ancestral polymorphism is A, Derived polymorphism is V
  VARIANT 40: note = Ancestral polymorphism is A, Derived polymorphism is V
  VARIANT 41: note = Ancestral polymorphism is G, Derived polymorphism is R
  VARIANT 56: note = Ancestral polymorphism is G, Derived polymorphism is D
  VARIANT 64: note = Ancestral polymorphism is K, Derived polymorphism is I
  VARIANT 73: note = Ancestral polymorphism is T, Derived polymorphism is I
  VARIANT 87: note = Ancestral polymorphism is P, Derived polymorphism is T
  VARIANT 95: note = Ancestral polymorphism is R, Derived polymorphism is H
  VARIANT 107: note = Ancestral polymorphism is G, Derived polymorphism is S
  VARIANT 120..267: note = Derived polymorphism lacks residues 120 to 267
  VARIANT 126: note = Ancestral polymorphism is A, Derived polymorphism is E
  VARIANT 144: note = Ancestral polymorphism is C, Derived polymorphism is S
  VARIANT 183: note = Ancestral polymorphism is A, Derived polymorphism is D
  VARIANT 198..267: note = Derived polymorphism lacks residues 198 to 267
  VARIANT 211: note = Ancestral polymorphism is G, Derived polymorphism is R
  VARIANT 214: note = Ancestral polymorphism is K, Derived polymorphism is M
  VARIANT 259..267: note = Derived polymorphism lacks residues 259 to 267
MANISSPVTKLLRLAKYRVVGRREVLESGDMAVLLRNAKAGDKVSARALLHLILDGDEGDASKKERTRVSFETGFFLLGGHAIYLGPDDIQMGKREETRDVARVLSGYNDIIMARVFAHQDILYLAKYASLPVINGLTDYNHPCQIMADALTMLEQIGRIENTKVVYVGDGNNIVHSWLLLADVLPFHFVCACPKGFEPDAHTVEMARGAGISKIEITNSPREAVKGADVVYTDVWASMGQKEEIDYRNQKSQGFTVDETLMEIAGP

SEQ ID NO: 20572 - protein, 340 aa, Zea mays
  VARIANT 215..340: note = Derived polymorphism lacks residues 215 to 340
  VARIANT 118..340: note = Derived polymorphism lacks residues 118 to 340
  VARIANT 59: note = Ancestral polymorphism is A, Derived polymorphism is S
MIMPSSSFHLNLKQISCLAENTNHVVVFDEVLSVAGKDICTKDIPRIRGGWAIQDVFYAFSQHKELALLFLEYTLSILHKEPVIINSSEKGESTSESLADDCILQATMFALNAFMRYWSPFDGSLLMLRMVGTFSSSDFTYFKKTSKLYRGGGKIGKQAVEKSYPSVLSGLILKLGSLNGVAELGRNELLRSLLIAFQSFCKCVGDVEMGKLLARDGEQTEKDKWIELVQEIACSSSVKRPKDVCSRLLEFCQLALSCVMLSTETRDGENSCGVQKAFEAMVLYSEQAEQAGSSEATGQEAHHGRMNEEEKFVAWNGCILLERLLSKTRVMHHCYCIFLR

SEQ ID NO: 20573 - protein, 800 aa, Zea mays
  VARIANT 492..800: note = Derived polymorphism lacks residues 492 to 800
  VARIANT 340..800: note = Derived polymorphism lacks residues 340 to 800
  VARIANT 148..800: note = Derived polymorphism lacks residues 148 to 800
MAVQAHSRPQNVSRQLWPVLHHAVSECCLIIMLVTTAVLSYMATRFARMCSLRSPCMLCSRLDQFLHGKAWFSEELVCATHRIEISRLSYCQSHNKLERSDDMCDKCMLSCMTSSGKTYNLTNMHGRDKVKSRSRSRHKHMCSCCSMQFKKKRDSHMLPDITNSWFPGDDMSKLKQRNIVMSSVGYSSNDDYDHLPYEGYRKLKLGHESEYDIHISNSDNDERNAVSHEARERANHMPSHDALLQPMISNASGLLMPSFDNTIMTKATQPLNNVRDTDTHSSDTKDANSLDHAIGLVLDDISWSQINTSDKNIDVQSKAIPEEVLAELPKEKNFLIGTEEVGDSFEDISGSPGVEAAKDFNASANAGTRSSVDTHISWNNSPKIASACRGYYKSPRLSEIISARDTNSKTNEEVKTFLSQLSTARGFDSSLNEMTPRSSTHIDDYRQHDATGMTPFLDRNNSNLDSFDANTTSEDEGESSLEHLKKQAKFNKKKMGMLYKELEAERSASAVAVSEAMAMINRLQEEKASMHMEALQYLRMMEEQADHDQEAIEKLNDLLTEREKELLDLEAELEGYRSKLHDQPFDVGKFGATDGAMAFRVLEGSDFMRHTIFDFEDEKAKILESLHRLEEILGMPSIDMGDANDSLQNSLLSDQSMHISQDIENSELESLSLPREDMISESISSQCYDEQESVKYMHKHMHNHEQDDNESVDKQQKNVTSCSHSDDGNIHTMKSVKHEISLLNARFKALEADQDFLKQILRSLNVSSDGVECIQEITSHLRELRRIMADQRDMTVFMRS

SEQ ID NO: 20574 - protein, 869 aa, Zea mays
  VARIANT 428: note = Ancestral polymorphism is S, Derived polymorphism is I
  VARIANT 295..869: note = Derived polymorphism lacks residues 295 to 869
  VARIANT 284..869: note = Derived polymorphism lacks residues 284 to 869
  VARIANT 223: note = Ancestral polymorphism is P, Derived polymorphism is R
  VARIANT 187: note = Ancestral polymorphism is G, Derived polymorphism is D
  VARIANT 105..869: note = Derived polymorphism lacks residues 105 to 869
  VARIANT 60: note = Ancestral polymorphism is G, Derived polymorphism is E
MRRWWPAALLGCAVAVSVLVAAVECAVTYDKKAVLIDGQRRILFSGSIHYPRSTPDMWEGLIQKAKDGGLDVIQTYVFWNGHEPTPGNYYFEERYDLVRFIKTVQKAGLFVHLRIGPYICGEWNFGGFPVWLKYVPGISFRTDNEPFKTAMQGFTEKIVGMMKSENLFASQGGPIILSQASIIFSLDLIENEYGPEGREFGAAGQAYINWAAKMAVGLGTGVPWVMCKEEDAPDPVVYSIIPVKNDAVVLIIKIINACNGFYCDAFSPNKPYKPTMWTEAWSGWFTEFGGTIRQRPVEDLAFAVARFVQKGGSFINYYMYHGGTNFGRTAGGPFITTSYDYDAPIDEYGLVREPKHSHLKELHRAVKLCEQALVSVDPAITTLGTMQEARVFQSPSGCAAFLANYNSNSYAKVVFNNEQYSLPPWSISILPDCKNVVFNSATVGVQTSQMQMWGDGASSMTWERYDEEVDSLAAAPLLTTTGLLEQLNVTRDSSDYLWYITSVDISSSENFLQGGGKPLSLSVQSAGHALHVFVNGQLQGSAYGTREDRRIKYNGNASLRAGTNKIALLSVACGLPNVGVHYETWNTGVGGPVVLHGLDEGSRDLTWQTWSYQVGLKGEQMNLNSIEGSSSVEWMQGSLIAQNQQPLAWYRAYFETPSGDEPLALDMGSMGKGQIWINGQSIGRYWTAYADGDCKECSYTGTFRAPKCQSGCGQPTQRWYHVPKSWLQPTRNLLVVFEELGGDSSKIALVKRSVSSVCADVSEDHPNIKNWQIESYGEREYHRAKVHLRCARGQSISAIKFASFGTPTGTCGDFQQGDCHSANSHTVLEKKCIGLQRCVVAISPESFGGDPCPSVTKRVAVQAVCSPVA

SEQ ID NO: 20575 - protein, 215 aa, Zea mays
  VARIANT 71: note = Ancestral polymorphism is R, Derived polymorphism is G
MEVPLSPPRAHASLLCCSSTPVVLGLRSRSATAPSRRARPLLARRNRDSRSDEETAAEPKIITVGRPGKSGRRRNRKQQQQQQQTAAKEEEEEEEEEDEDEEEERDATIPEVVTNRMMRRVGASVGLPLALGVGLFPVFYYLKAVAKVDVPTWIPFGVSFVFFGAALAGVSYGIVSASWDPAREGSLLGWNEARRNWPVFWDSLRGRSQSPPRRG

SEQ ID NO: 20576 - protein, 310 aa, Zea mays
  VARIANT 15: note = Ancestral polymorphism is G, Derived polymorphism is D
  VARIANT 38: note = Ancestral polymorphism is Q, Derived polymorphism is H
  VARIANT 57: note = Ancestral polymorphism is N, Derived polymorphism is S
  VARIANT 208..310: note = Derived polymorphism lacks residues 208 to 310
MGQQRTLVYSFVARGTIVLADHAEVSGNFASVAAQCLQKLPANNNRFNYNCDGHTFNYHIYDGFTYCVVATESAGRQLPVGFIERVKEDFSKKYSGGKAKNASANGLKREYGPKLKEHMRYCDQHPEEIDKLAKVKAQVTEVKGVMMQNIEKVLDRGEKIELLVDKTEDLRSQVPHIYDLMHVQSIGSIDLTITKLTALVSPVGTRFQATGNKDTTEDVVGKHEDEAHRFRHRGCADPPHCLDSLQGLELLIRSRHTGKKRRTWKREGKKNIEGALLVSHRTAKIHLVFVMLTLITLLFLVMSRSLGSKL

SEQ ID NO: 20577 - protein, 577 aa, Zea mays
  VARIANT 340..577: note = Derived polymorphism lacks residues 340 to 577
MDQLPKRPANYVPLSPVGFLARANAVYADRASVVYGGVRFTWRQTYERCRRLASALLSLGVRRGDVVSVLAPNVPAMYEMHFAVPMAGAVLNAINTRLDAAAVATILRHSGAKLFFVDYDYVRLAGDALRLLAAAAGGTVPLVAVVDDIDSPTGARLGELEYEALVAHGDPDADLPPLADEWDAVTLNYTSGTTSAPKGVVYSHRGAYLSTTSLLLQWGVATDPVYLWTLPMFHCNGWTFTWGMAARGGVNVCIRDARRADIYRAIARHRVTHMCCAPVVFSILLDGDGDGDGRQLEAPVHVLTGGAPPPAALLERVERIGFKVTHAYGLTEATGPALACEWRDQWDRLPLPERARLKARQGISVLSLADADVKNVDTMASVPRDGKSLGEIVLRGSSVMKGYLNNPEANDGAFRGGWFLTGDVGVVHPDGYIEIKDRSKDVIISGGENICSKEVEEVLFRHPAVADAAVVAMPHPRWGETPCAFVVPRDGKAHGLSEDDVLAFCARRMARFMVPKKVEVIGALPRNALGKVEKVKLREAARKLAPTVPAQIKPKGKTTTSTVVGGGRCEEQPVSRL

SEQ ID NO: 20578 - protein, 868 aa, Zea mays
  VARIANT 817: note = Ancestral polymorphism is Q, Derived polymorphism is L
  VARIANT 752: note = Ancestral polymorphism is T, Derived polymorphism is R
  VARIANT 725..868: note = Derived polymorphism lacks residues 725 to 868
  VARIANT 604..868: note = Derived polymorphism lacks residues 604 to 868
  VARIANT 587..868: note = Derived polymorphism lacks residues 587 to 868
  VARIANT 584..868: note = Derived polymorphism lacks residues 584 to 868
  VARIANT 579..868: note = Derived polymorphism lacks residues 579 to 868
  VARIANT 564..868: note = Derived polymorphism lacks residues 564 to 868
  VARIANT 557..868: note = Derived polymorphism lacks residues 557 to 868
  VARIANT 408..868: note = Derived polymorphism lacks residues 408 to 868
  VARIANT 351..868: note = Derived polymorphism lacks residues 351 to 868
  VARIANT 313..868: note = Derived polymorphism lacks residues 313 to 868
  VARIANT 95..868: note = Derived polymorphism lacks residues 95 to 868
  VARIANT 94..868: note = Derived polymorphism lacks residues 94 to 868
  VARIANT 69..868: note = Derived polymorphism lacks residues 69 to 868
  VARIANT 67..868: note = Derived polymorphism lacks residues 67 to 868
MLDLSRFRDRDRARCHDWCFAAFVHAYATYLDDRLKERMQARRAGGASPGKWHVDGDPVGMACQVAEAWELVPQGRSASATETTAAEDVIGKAQQLKHLLGRFIQCRPTGKAMTNPVVTAALYRLVKESAAMYCELTEMSGPNKSPFSGVADDLKGRAGCYKQDWNHGFRSGLRILAPTLYIFFASTVPVIAFGEQLSKDTDSALTTVETLASAAICGIVHSIIGGQPLLIVGVAEPTIIMYTYIYNFAKNQPNLGEKMFLPWAACYSKQIYQVCRRTFWNVNHSFFMQEAIKGMVGEFSAPDGSNQSQSTFQFQWLYINGLLGFIFSMGVLYTALASRSVRSSLYGTAWQRSLIADYGVPLMVILWTSLSYSLPSRIPSGVPRRLFTPLPWEPKSLQHWTVAKDLFSVPTVHIFLAIVPATMVAGLSFFDHSVASQMNLDLWCGLLGIPPSNGVLPQSPMHTRSLAVLKRQLLCKKMVQTAKEGMMNNATSSEVYVKMQDVFIKMDHGGDTVSAHKELKDLKDAIIPEGNGSRTVPEVFDPEKHVDAYLPVRVNEQRVSNLLQSLLITGCIGVTPLIQKIPTSVLWGYFAYMSIDSLPGNQFWERIQLLFITPQRRYNAFQHNMHLHTLPANLSVDRLWDDMDTSSRNPLPTALLLPHYHQCEDESVRSGDAQPGYASEILEEFTTHRGELKRRNSTFHDGRLLQLNSVKMTRELSRVPSWLTRILEEYAVSESELQLSMGVRSLIASLLTEYSLKQATHFSDRCFVYLYLLRVQLFLGFNLYKSVPSCGDEIRGDVQRDLRQLLRVITAIAAGGQVSFAGSLGSDGQYLVLLDAGAVAVAVPSYVSLEEDGEINDENWINRSEAAP

SEQ ID NO: 20579 - protein, 405 aa, Zea mays
  VARIANT 162..405: note = Derived polymorphism lacks residues 162 to 405
  VARIANT 163..405: note = Derived polymorphism lacks residues 163 to 405
  VARIANT 173: note = Ancestral polymorphism is I, Derived polymorphism is T
MTSPKRAAGREGCGCLAAVARGLRGACFRPAVTADGDGGGSAKGSHVHDAAETRYLNASNRELGDHFQTKRDGENGVDASIEKRTPKLLQFTFQELKSATLNFRPDSILGEGGFGYVFKGWIEPNSTAPAKPGTGVTVAVKSLKPDALQGHREWVAEVDFLGQLHHKHLVKLIGYCIEDDQRLLVYEFMARGSLENHLFRRALPLPWSNRMKIALGAAKGLAFLHGGPKPVIYRDFKTSNVLLDVEYNAKLSDFGLAKAGPQGDKTHVSTRVVGTYGYAAPEYVMTGHLTSKSDVYSFGVVLLEMLTGRRSMDKKRPTGEQNLVAWARPYLNDRRRLYQLVDPRLGLNYSVKGVQKVAQICHYCLTRDSKSRPSMDEVVKQLTPLQDLNDMASASPRPRSTQRGE

SEQ ID NO: 20580 - protein, 116 aa, Zea mays
  VARIANT 30: note = Ancestral polymorphism is P, Derived polymorphism is A
  VARIANT 79: note = Ancestral polymorphism is W, Derived polymorphism is C
  VARIANT 85: note = Ancestral polymorphism is F, Derived polymorphism is C
  VARIANT 93..116: note = Ancestral polymorphism lacks residues 93 to 116
MVRTTVVGRERSGGVRQYNRSKVPRLRWTPDLHHCFVHAIHKLGGPDRATPKRVLQLMGVGGLTISHVKSHLQVLSRTWSRIMVFISFCYLLQLTSIYGMYRNMRNDLGMQGTYPK

SEQ ID NO: 20581 - protein, 233 aa, Zea mays
  VARIANT 77: note = Ancestral polymorphism is W, Derived polymorphism is L
  VARIANT 16: note = Ancestral polymorphism is A, Derived polymorphism is V
MRAEVTQISALTAVAAHVLCSAGLAAAHALAGRGALVSDPALALRLLVVCEAPIVIAVFSYLRRDAKSCSIFDSAMWSWGSIYFQFFRAVARGLIGLPVGAFLNAFGAIILGAPVGVKYWIATIYWSLVMSLFTFVPAACVFGASRIDWQDVLSHSIYFTPTDVENYMISAPCHGAVLGAWLGAWPMPLDWERPWQEWPICVTYGAVAGYLFGMAVSLVLTALYKRRVRAKAD

SEQ ID NO: 20582 - protein, 605 aa, Zea mays
  VARIANT 503: note = Ancestral polymorphism is R, Derived polymorphism is S
  VARIANT 29: note = Ancestral polymorphism is I, Derived polymorphism is T
  VARIANT 8: note = Ancestral polymorphism is P, Derived polymorphism is L
MSTSMSAPAPTPVPLTSFALLRQHHSQLIRLGVASHAAHARRLLSFLARDPDSHFPYASRLLAHHPDPHPALFNPLFSALPTRHAARLLALMLSLPLRPDHFTFPQILPSAQPLHLVAQLHALLLKLGFHAHTQSLNALLAAYLANARPDLASRVFRGGGGALDVVSWTTMVGGLLKLGLFDDARVLFDGMPERNLVSWNAMMSGYVKACRFLDALEVFDEMRARGVDGNVFVAATAVVACTGAGALARGREVHRWVEQSGIQMDEKLATAVVDMYCKCGCVEEAWRVFEALPLAAKGLTTWNCMIGGFAVHGRGEDALKLFGRMEREGVAPDDVTLVNVLTACAHAGMLSEGRHYFNYVPQRYGIEPKMEHYGCMVDLYGRAGRLEEAKKVIQDMPMEPDVGVLGALFGASKIHGDVDLGEAIGWRVIELDPQNSGRYVLLANLLATAGRWEDVARVRRLMDERNVSKEAGRSVIEVQGEVCEFQCGGLCHPRAEEVYAMARDMMREIRAEGYVPDTRDVLHAIAEEEKETPLLYHSEKLAIAFGLLHTRPGDTMRITKNLRVCRDCHEATKFVSRVFERQIVVRDRNRFHHFKDGQCSCKDYW

SEQ ID NO: 20583 - protein, 883 aa, Zea mays
  VARIANT 46..883: note = Derived polymorphism lacks residues 46 to 883
  VARIANT 49..883: note = Derived polymorphism lacks residues 49 to 883
  VARIANT 56..883: note = Derived polymorphism lacks residues 56 to 883
  VARIANT 71..883: note = Derived polymorphism lacks residues 71 to 883
  VARIANT 98..883: note = Derived polymorphism lacks residues 98 to 883
  VARIANT 620..883: note = Derived polymorphism lacks residues 620 to 883
MAPDPCGDLVVTPKTAAKDEASCSVPTPPKVTPDEVRAVARKFADQPIQETEPDVWAVLTAISKKARLRPQGMNILLSADEHCLGRSVEERFRIFAQQISGMHCKIYRDTVLGELNRHEPVPVFLKDTSSNGTFINWKRLKKNSSPVKLNHGDIISLSSPPHDDNSFVFVYREVNAISRVENGAPILKRKSVEGGSGSKRLKGLGIGSPDGPVSLDDVRRLEKSNADLREQLEAHVVTIETLRAEIKTAQVQHGKELEELRETISSSYLDQTKSLRSALEEKQKQIDSLSTSNTELQNSIKDLDERLNASKQSRADADEIISSQKGMICELEGQLNEERNLRREERDKAAHDMKSALHKVQAEAQEEIKKQAESYLRQQREQKEVISKLQESEKETRLFVETLRSKLEDARDNLVTSEKRVRELEAQLQDEQMVSANNRKKTENLEAELRKLKKELDNEKAAREEAWAKVSALELEIAATIRDLSIEKQRYQGARERIILRETQLRAFYSTTEEISSLFAKQQEQLKAMQRTLEDEENYESTLMGVDLNKVPLTTDNAGMKPVDCSKNTVGASSASPENTQVSEHDSSDEDANMTEQQDDDGTAIGGSTQGLECTSPERSEGRLKSGFHGNPVSTAPEREVTDTEQVPETDSQAGNAGCDDQRCDNTGGETMPLEDDMLLPDNEEPTALLKDVGQPQANVVPIPIPGDGVGHCFEEKHEGACSESKREDTHAGAIRTADLLASEVAGSWAVETAPSVNGENESPRSLGDATEHDEAGGSVAGDALVTLVNSEGQAAGSQNNVERGSSKITHHHHHHRHHHRVLSAMIGIVDPEFRKQMSGRSGVGNEEPMSDAETGEGIEEGDSDSGSDGSDSEEAMVEDSVV

SEQ ID NO: 20584 - protein, 337 aa, Zea mays
  VARIANT 293: note = Ancestral polymorphism is E, Derived polymorphism is G
MEAFAAQHQGDVCMEAVGVDTAAQQGPRPRTAHRRSRSDVPSGYYFGGEGHQLPPPKVEAGWGGHLHGGGGDDDLFNAYLNLEGLDGLNSSDDRRQYYDGDSRGSSVRTNGADSSENDSEECAAAGPPVAHHVRSLSMDSSLIGKLNFSAGAAAANGGVIPGPNRFSLEFGSGEFTPVEMNKIMADEKLAEMALADPKRAKRVLANRQSAARSKERKMRYIAELEQKVQILQTEATALSAHLTLLQRDSAGIATQNNELQFRLQAMAQQAQLRDALNEALTAEVQRLKLATAELGDSCSSNSLAQQMQIQLSAHDQTFELHQQQAMPIAFYQLRQAQ

SEQ ID NO: 20585 - protein, 146 aa, Zea mays
  VARIANT 58: note = Ancestral polymorphism is R, Derived polymorphism is Q
  VARIANT 101: note = Ancestral polymorphism is D, Derived polymorphism is N
MESCVPPGFRFHPTDEELVGYYLRKKVASQKIDLDVIRDIDLYRIEPWDLQEHCGIGRYEEQSEWYFFSYKDRKYPTGTRTNRATMAGFWKATGRDKAVHDRSRLIGMRKTLVFYKGRAPNGQKTDWIMHEYRLETDENAQPQASK

SEQ ID NO: 20586 - protein, 223 aa, Zea mays
  VARIANT 55: note = Ancestral polymorphism is D, Derived polymorphism is N
  VARIANT 203: note = Ancestral polymorphism is T, Derived polymorphism is M
MPAGGRARVLQEEGWVVCRAFKKRTAYPARSMAMAWDPSYAYREASATGAAAFVDPNAASYTQIRRQPNKSERFKQELAELDGAAALLQYSASHLLELPQLESPSAPLAPANPSQASAADEAAVDAADSGRRPGKKARADKAATDWRALDRFVASQLSPAAASTTAAASSVACSQVDHVEDDDMAALLFLNSDDGRDEAERWTGLLGPAAGGDGDFGLCVFEK

SEQ ID NO: 20587 - protein, 479 aa, Zea mays
  VARIANT 389: note = Ancestral polymorphism is P, Derived polymorphism is S
  VARIANT 388..479: note = Derived polymorphism lacks residues 388 to 479
  VARIANT 356..479: note = Derived polymorphism lacks residues 356 to 479
  VARIANT 280..479: note = Derived polymorphism lacks residues 280 to 479
  VARIANT 88..479: note = Derived polymorphism lacks residues 88 to 479
MLREVSLTNATFNSQLISIGALGLISRLNIGALELGDYLALGAIFSATDSICTLQVLSQDETPFLYNHVFGEGVVNDATSVVLFNAIQNFDPRNISGAKLLNFIGSFLYLFGSSTILGVASGLLSAYTIKKLYFGRHSTDREVSIMMLMAYLSSMLAEVNTLKFEGHNQVSSFIPSVWTFAFDHAFFGNAYANVIVWWAGLMRGAVSIVLAYNKVRPGMRIHEHCYSIMSPLSTILQGKTLAILHEFQVLQVVAIGECGLDYDRLQFCPADMQKKYFEKQFELSEAVKLPMFLHMRAAGEDFCEIMTQNLHRFPVGVTHSFTDLAEDWDRLLSFENMFIGVNGCSLKTNENLEVLRGIPVERLMIETDSPYCDIINTHARSPYVKSVWPFKKKEKYEPDSTVKGRNEPCLVRYVATVCHQFLGFLARQVLEVVVGSKGISGVEGLSRTLYHNTCRLFFPQDLDASANAQLESGTAVQDC

SEQ ID NO: 20588 - protein, 239 aa, Zea mays
  VARIANT 171..239: note = Derived polymorphism lacks residues 171 to 239
MLSHAYDRSLGGRDFDEALFKHFATKFKEEYKIDVYQNARACLRLRVACEKLKKTLSANPEAPLNIECLMDEKDVRGFIKREEFEHISAPVLVRVKRPLEKALAEAGLTTENVHFVEVVGSGSRVPAIIKIITDFFGKEPRRTMNASECVARGCALQCAILSPTFKVREFQVIFVDADQIISENEEALWFRLMVVRQGHFLAGGHHPLLPERDHPQGLGHRPAVLHLPLWTSEREAGQD

SEQ ID NO: 20589 - protein, 466 aa, Zea mays
  VARIANT 204: note = Ancestral polymorphism is S, Derived polymorphism is F
  VARIANT 241..466: note = Derived polymorphism lacks residues 241 to 466
MAEPKAAAAARKTRVGPYEVGKTIGEGSFAKVKHARDSRTGAVRAIKVLDRNHVLRHRMVEQIKREISTMKLIKHPNVVQLHEVMASKTKIYMVLEFVDGGELFDKIVNSGRLGEDEARIYFHQLINAVDYCHSRGVYHRDLKPENLLLDSNGALKVSDFGLSAFAPQTNEDGLLHTTCGTPNYVAPEVLADKGYDGMAADVWSCGIILFVLMAGYLPFDDANLMRLYKLICQAYFSCPPWFSSGAKKFIKRILDPNPDTITSSHCHYCWIKGDVFLQRITIAEILEDEWFKKDYKPPRFEQGEDVSLDDIDAAFNDSEDRLVAEKREKPESMNAFALISRSQGFNLGNLFEKEMMGMVKRETSFTSQCTAQEIMTKIEDACGPLGFNVRKQNYKMKLKGDKSGRKGHLSVATEVFEVAPSLHMVELRKTGGDTLEFHSFYKNFSSELKDIVWKAESDANNKQTNK

SEQ ID NO: 20590 - protein, 357 aa, Zea mays
  VARIANT 248..357: note = Derived polymorphism lacks residues 248 to 357
MASSQANLDKMQLRQSYRNVWHTDMTNAIQADFPYCCLALWCGPCVSYMLRKRALYNDMSRYVCCAGYMPCSGKCGESRCPEFCLATEVFLCFGNSVASTRFLLQDEFNIQTTQCDNCIIGFMLCLQQVACIFSIVAAIVGSEELSEASQILNCLSDLVYWTVCACMQTQHKVEMDKRDGKFSPQPMAVPPVQQMSRIDQPMPPPAGYAPQPAYGQPYGGYPSPPGQGYPPPPGQGYPPAGYSQGGAYPPPAQGYPHGGGYPPPGQGYPQGQGGAYPPPGSYPPQGSYPPAEGSYPAQGSYHPAQGSYPAQGSYSPAQGSYPAQGSYPPPPAQGSYPPAQGSYPAQGSYPPQAYPGK

SEQ ID NO: 20591 - protein, 160 aa, Zea mays
  VARIANT 81: note = Ancestral polymorphism is G, Derived polymorphism is V
  VARIANT 36: note = Ancestral polymorphism is T, Derived polymorphism is M
MSGGIARGRLAEERKAWRKNHPHGFVAKPESLPDGTVNLMIWHCTIPGKQGTDWEGGYFPLTLHFSEDYPSKPPKCKFPQGFFHPNVYPSGTVCLSILNEDSGWRPAITVKQILVGIQDLLDQPNPADPAQTDGYHLFIQDPTEYKRRVKLQAKQYPALV

SEQ ID NO: 20592 - protein, 187 aa, Zea mays
  VARIANT 111: note = Ancestral polymorphism is F, Derived polymorphism is S
  VARIANT 61: note = Ancestral polymorphism is R, Derived polymorphism is C
  VARIANT 51: note = Ancestral polymorphism is N, Derived polymorphism is Y
  VARIANT 7: note = Ancestral polymorphism is R, Derived polymorphism is C
MIMIFVRTCESTRLLALMLRNLGLKAMSISGQMSQDKRLGALNRFKAKDCNILIGTDVASCGLDIQGVDMVINYDIPMNSKDYVHRVGRTARAGRSGYAVSLVNQYEAQWFVLIEKLLGKKIDHRKVDRDEVMILKGPISDAKRIALTKLKESGGHKKRGKVGDDDEEVENHSHSKRPKSFKKSNRR

SEQ ID NO: 20593 - protein, 324 aa, Zea mays
  VARIANT 204: note = Ancestral polymorphism is G, Derived polymorphism is R
  VARIANT 191: note = Ancestral polymorphism is Q, Derived polymorphism is R
  VARIANT 151: note = Ancestral polymorphism is R, Derived polymorphism is G
  VARIANT 113: note = Ancestral polymorphism is R, Derived polymorphism is M
MVRFSFSPSGDGVATTVAIMEQWTDKQQVVASTSAAMAAQMPFLALLQGAGVVVEGAETEQQQYEHEHDGRKRQALARAVSKLDLLESCLTQAAAPAAAACAPVASRTTERRMKRPRTRARAAPPPEKRRKPEEAESQRMTHIAVERNRRRLMNDHLASLRSLIPSSYIPRGDQATVVGGAIDYVKQLEQQLVALQAAAGARRGSSVVSDDGVFLVSPQYASYSGSRGGGGLGVDVEATGAVGGHVRVRVAGRRWWPGRLVRAVAALEGLRLAVLHLAVTSVGRDAVVCCFNLKMEEGCEVATADEVATVVHQIFAYSAAGACC

SEQ ID NO: 20594 - protein, 228 aa, Zea mays
  VARIANT 27: note = Ancestral polymorphism is S, Derived polymorphism is I
MVSEQQAPAAEVVVEGSEAAAEVPVESEEAAAPKAEEQQDDEAPVVEDVKEDEDEDDDDEDDDDADDDDADGGAGATEGTKQSRSEKKSRKAMMKLGMKPVTGVTRITIKRAKNILFVVSKPDVFKSPTSETYVIFGEAKIEDLSSQLQAQAAQQFRMQDLSKVMAKQDAAAAAAAPADEEEEVDEAGIEPRDIDLVMTQASVTRAKAVKALKAHDGDIVSAIMELTA

SEQ ID NO: 20595 - protein, 100 aa, Zea mays
  VARIANT 49: note = Ancestral polymorphism is E, Derived polymorphism is K
  VARIANT 52..100: note = Derived polymorphism lacks residues 52 to 100
MHKSKGKFSGVLHKGFKPDKCKTSPRMAVGRIKLLRNRKEVQVRQMRREVAQLLEANQDMTARIRVEHVIREEKFMQAYDLIEVYCELIVARLSIIDSQK

SEQ ID NO: 20596 - protein, 137 aa, Zea mays
  VARIANT 46: note = Ancestral polymorphism is I, Derived polymorphism is T
MGLKSLALQLKMSEALEKDKEICEEEEEYVLVELDISLGAPIVLSTHSMFAPLLSAKTETKPTNDEITPSEENTDKPAHSSNEAPSKEVIHLAIVQKILKFRPFSAGVSAAWSISSQGQGAPDKKKPFSCSIPPVYI

SEQ ID NO: 20597 - protein, 238 aa, Zea mays
  VARIANT 142: note = Ancestral polymorphism is K, Derived polymorphism is T
MSGPTSTTSAIRIASVVRNGRTPSNSSTSAIRVAYPPTNGVQPPALYKVAPPAAFFRTQQQATSSPNKQPPPPRSRREEAQSRNRRPIPMAPKAEKKPAAKKPAEEEPAAEKATAGKKPKAEKRLPAGKSAGKEGGEKKGKKKAKKSVETYKIYIFKVLKQVHPDIGISSKAMSIMNSFINDIFEKLAAEAAKLARYNKKPTITSREIQTSVRLVLPGELAKHAVSEGTKAVTKFTSS

SEQ ID NO: 20598 - protein, 141 aa, Zea mays
  VARIANT 64: note = Ancestral polymorphism is E, Derived polymorphism is D
  VARIANT 48: note = Ancestral polymorphism is T, Derived polymorphism is M
MSEALQKDKEIGEEEEEEEYVLLELDNCLYSDISPGAQFVLSGLDTLTPTLIVGDNLKMVGEYDETIGTCYLFSESETEPKPASDELAPSKENTETPLNSSKEAPLKEVNHLASVQKILKFKPINVEHSQHRAYQHKDKEL

SEQ ID NO: 20599 - protein, 835 aa, Zea mays
  VARIANT 694: note = Ancestral polymorphism is P, Derived polymorphism is S
  VARIANT 589..835: note = Derived polymorphism lacks residues 589 to 835
  VARIANT 436: note = Ancestral polymorphism is V, Derived polymorphism is L
  VARIANT 429..835: note = Derived polymorphism lacks residues 429 to 835
  VARIANT 294..835: note = Derived polymorphism lacks residues 294 to 835
MEQSGQRHLGGICEAITYRNQRAIAIAIAAELAASQMMGYPAYTTVACLLPSPYVHRSHSRLPHTATDLVGGIHAVCRPMPGHSSIGHLGWELRLRGGLRRRYHDRAADYVIPRHPLQVALDAADGRRPAPPHRHGEAPLLVHPVEPQRRGPHHHGHGPAGHVHHGPVHGAGLPDIGHGAADGDRAGQQLHHQRRVVELRLGDGLQPLAAAGDAAPRYLLHAAVPDAQAAEVGDVVAGAEVVHQPRVHGAGRVHVPGAHAVEARPPVLLVLDGHARVVRRVRRRHDRRLHRRGGPARVQALDDGRDPAQVRRRHGRPGLHEEGQAHVVRELRVHLAGRPRRQDVHAGPRDVRLQDARARPVGPARREEGHGRRRGRPHHRAPERDGRRGPGRRPGVRRDPRPRGVAHVRRGQHVRVGEGGVPLRRLVHQDHAGAAVRGHRLPLLDVLADGAALAQHHLAPHLGLHQRAAVAGLREDERQRAPRGVVPGLEQRLAVELLPVAEPHGCAYRAVRGARRDREHPRRAVGDGPRGGAVVAGRGADEDAVLHGLERGDGDEVVVELRAVGGADGEGEHVHAVPDGGVQAGDDVQDGAPAPRAHLVDGQVRVRRHPGRPAVRVAPHAGVLRVVDGRAPERARADDLVAAPAAGDGPELAGALPLLGRRWHPRVAEGRVGGQDAGVEEPNHDAAAEPGSAPEAVLAHVEAEEARRVGGSQRQELLRVQPQAPLLAPQRLRLRVSEAGGEPRQHVAVRVDDPGPVIRRRVQRGLRQERPVPLLHRPAAAVVVPRLEMNHVVLALLRVGDGEQRGGQQQEEGKEVSLGPHEAMQCRTGPGEGDS

SEQ ID NO: 20600 - protein, 726 aa, Zea mays
  VARIANT 128..726: note = Derived polymorphism lacks residues 128 to 726
  VARIANT 166..726: note = Derived polymorphism lacks residues 166 to 726
  VARIANT 386..726: note = Derived polymorphism lacks residues 386 to 726
MRTQRNLLPLLLLLSAALLAVADAQERKNYVVHLEPRDDDGGGGSVEEWHRSFLPEATLDSAADDGPRIIHSYSHVLTGFAASLTDAEAQTLRRKEGCLRLYPEEFLPLATTHSPGFLGLHMGKHGFWGRSGFGRGVVIGLLDTGILPTHPSFGDAGMPPPPKKWKGACQFRSVARGGCSNKVIGARAFGSAAINDTENAGVRGNAHGRASGMAPHAHLAIYKVCTRSRCSILDIVAGLDAAVRDGVDVLSFSIGATDGAQFNYDLIAIATFKAMEHGIFVSAAAGNDGPAAGSITNGAPWMLTVAAGTTDRAIRTTVRLGNGQEFHGESLFQPRNNTAGRPLPLVFPESRDCSALVEAEVRGKVVLCESRSISEHVEQGQTVAAYGGAGMVLMNKAAEGYTTFADAHVLAASHVSHAAGSRIAAYARSAPRPTASIAFRGTVMGSSPAPSVAFFSSRGPNRASPGILKPDITGPGMNILAAWAPSEMHPEFADDVSLPFFVESGTSMSTPHLSGIAAVIKSLHPSWSPAAVKSAIMTSSDAADHAGVPIKDEQYRRASFYSMGAGYVNPSRAVDPGLVYDLGAGDYVAYLCGLGIGDGGVKEITGRRVACGGKRLKAITEAELNYPSLVVKLLSRPVTVRRTVTNVGKASSVYRAVVDMPSRAVSVVVRPPTLRFDRVNEKRSFTVTVRWSGPPAVGGVEGNLKWVSRDHVVRSPIVIPPAKATA

SEQ ID NO: 20601 - protein, 349 aa, Zea mays
  VARIANT 5: note = Ancestral polymorphism is G, Derived polymorphism is E
MGLLGRRPWLLLLALASAAVAVAVAVEASEGDADPLYRACVEGCQKTGSLKEASIKHCMVPTDGQPADKSWYAHEPLYLQWKDWNCKSECRYHCMMEREGERAKLGLQPVKYHGKWPLKRASVFQEPLSAALSALTLVVQFNGWLSFFLLLYYKLPLRPETHKTYYEYTGLWHIYGLLAMNSWFWSAIYHSCDTIWTEKLYFSSAAAFLGYSLILAILRTSSLRDEASRVMVAAPILAFVTTHILYLNFYELDKGLNMKVCTVISIAQCLLWALWAVMSGHRSRLKIISVAVGGAVAVLVEAYDIPPRWGYADGRAICLAVAIPLSYLWWSFAKEDAEMRTSAILKKTR

SEQ ID NO: 20602 - protein, 815 aa, Zea mays
  VARIANT 195..815: note = Derived polymorphism lacks residues 195 to 815
  VARIANT 197..815: note = Derived polymorphism lacks residues 197 to 815
  VARIANT 288..815: note = Derived polymorphism lacks residues 288 to 815
MYVVKRDGRQETVHFDKITARLKKLSYGLSQDHCDPVLVAQKVCAGVYKGVTTSQLDELAAETAAAMTASHPDYASLAARIAVSNLHKNTKKSFSETIKDMYMHFNKRSGLMAPLVAEDVYEIIMKNAARLDSEIIYDRDFDYDYFGFKTLERSYLLKLDGKVVERPQHMLMRVSLGIHKEDIESAIRTYHLMSQRWFTHASPTLFNAGTPRPQLSSCFLICMKDDSIEGIYETLKECAVISKSAGGIGVSVHNIRATGSYIRGTNGSSNGIVPMLRVFNDTARYVDQGGGKRKGAFAVYLEPWHADIFEFLDLRKNHGKEENRARDLFYALWVPDLFMQRVQNNGEWSLFCPNEAPGLADSWGEEFDNLYKKYESQGKAKKVVPAQTLWFDILKAQIETGTPYMLYKDTCNRKSNQQNLGTIKSSNLCTEIIEFTSPTETAVCNLASIALPRFVREKDVPLESHPSKLVGSSDSKNRYFDFEKLAEVTSTVTYNLNKIIDINYYPVETAKRSNMRHRPIGIGVQGLADTFILLGMPFDSPEAQQLNKDIFETIYYHALKASAELAAKEGPYETYEGSPVSKGILQPDMWDVVPSNRWNWPSLRETISKVGIRNSLLVAPMPTASTSQILGNNECFEPYTSNIYSRRVLSGEFVVVNKHLLHDLTEMGIWTPTLKNQIIYDDGSVQKIAEIPDDLKAIYKTVWEIKQKTLVDMAVDRGCYIDQSQSLNVHMEQANFGKLTSLHFHAWSKGLKTGMYYLRTRAAADAIKFTVDTTLLKENGNGVSDGKPAEEDVDAKMAQMVCSLNNREECLACGS

SEQ ID NO: 20603 - protein, 369 aa, Zea mays
  VARIANT 252: note = Ancestral polymorphism is A, Derived polymorphism is V
  VARIANT 154: note = Ancestral polymorphism is Y, Derived polymorphism is F
  VARIANT 146: note = Ancestral polymorphism is D, Derived polymorphism is A
MNRKEPLCARQTPTQLTSAMASAAAVEWEAAARKVLVARKPCFGLPTACPTCLPVLLYLRMAQVPFDIHVDTSFPDADHIPYVEFGDCVAFNNEKGGVIEYLKDEKIADLNSNHPNISSTTVLDTKAMVSSWLANALLYELWVVSAGSIANDIYFSDLPWPIGKILHWNKTRHVKQLLGITKLNAAEKEEEIYLKASAAYDSLSFRLGDQVFLFDNRYTSINLYPAYFSVLCVSPTDVDALFLGHALFVLSALPDTSVLRGTLQKHDNLVSFAEHHKVQLLETSSSSSSGLGSSPSPSSSTPRRRPSADHSYKPKPRAKKERTEEEKKFRRRAKYFLATQLVAVLVFLSLMGGVDSSELDDEDGLDYDD

SEQ ID NO: 20604 - protein, 560 aa, Zea mays
  VARIANT 83..560: note = Derived polymorphism lacks residues 83 to 560
MWVTSMPQVWDEEGAAKGGAVTPAPAAAMLGSLAGWLSRTVQPQPPAPRVCGTAGGPPVTAPRLRLRDGRHLAYCESGVPRDQARFAVVFSHGFTGSREDSVRASQGRWTATSVYCLSTCNAKLEFGELQLVSYTGSLPLARRLSVGCHFHSQAADGALRRDAVIAASDADWALIRIGLVVGPLEEQSRHGHADTAGSSTKSLGRPGAGVLALAAMELLAKAPVLGCAGKMQRQRQRGSALGRWICRAVAPPRAAPATPPRVRLRDGRHLAYAESGASKEDARFKVVFSHGFTGSRLDTVRPAPEVAEELGVYMVGFDRAGYGQSDPNPNRSVKSAALDVEELADALGLGPKFYVIGISLGCHAVWGALKYIPDRIAGAAMMAPVVNYWWPGFSPELAAEVYAKQEVGDQWALRVSHHAPGILHWWMEQSWLPTSTVVAGTTPLPNERDAEIRSKMKADGTFQQKREQATQQGIHESYYRDMTVMFGKWEFDPMALPEPPCPVHLWQGDEDGLVPVVLQRYLAGKIGWINYHELPGTGHFLSSVPGLGDNVLRTLFSDKQ

SEQ ID NO: 20605 - protein, 255 aa, Zea mays
  VARIANT 91: note = Ancestral polymorphism is P, Derived polymorphism is A
  VARIANT 118: note = Ancestral polymorphism is G, Derived polymorphism is D
  VARIANT 185: note = Ancestral polymorphism is R, Derived polymorphism is C
MRPVFCGNFDHDTRQYDLERLFSKYGPISRIDMKLGYAFIYFEDERDAEDAIRRLDNVSFGYNRRRLSVEWSRQVEPVPKSRDRPTGDVKPTRTLFVINFDPIRTKVQDIEKHFEPYGKIANIRIRRNFAFVQYETQEEASAAVKNTDKSTILDRVVTVEYAFRDDDGDRDDRYDIPKQGAYDRRGGSPYMRSPSPRYRRDYVPDYGRRGRYPGYGRRDGAMYERRSPVYDRYGGGRSPAYDRYDRRRSPGYDQY

SEQ ID NO: 20606 - protein, 197 aa, Zea mays
  VARIANT 81: note = Ancestral polymorphism is V, Derived polymorphism is G
MADPRLYPTESGSDDRRDAAYPGSERRLYNPYQDLNLPYRQLYDLPTSPEFLFQEEAVAQRRSWGENLTYYTGVGYLGGAGAGAALGLRDAARGAEPGEPAKIRANRVLNSCGSSGRRVGNTLGVIGLMYAGIESAMVAARDRDDWINSVVAGLGTGALFRAANGPRSAVVAGAVGGVLAGAAAAAKQVGKRYLPAL

SEQ ID NO: 20607 - protein, 171 aa, Zea mays
  VARIANT 48: note = Ancestral polymorphism is W, Derived polymorphism is C
  VARIANT 40: note = Ancestral polymorphism is A, Derived polymorphism is T
MAMPRAPGAGSLRFLGLLKQPESDAAAPFELDERDVLWPTGGGQQDGWAAPPARRRRAHAMPLYSFGLSSLLAEDCGGGVPVPVPGRAMAMAPSAAPRQSAPVRVPAPWPGGRRADEDEEDGEEVVPPHVVAARRHARSSSVLEGAGRTLKGRDLRSVRNAVLRQTGFLDL

SEQ ID NO: 20608 - protein, 1041 aa, Zea mays
  VARIANT 835..1041: note = Derived polymorphism lacks residues 835 to 1041
MLLQRRGGLLCCGCGASAVAVAVSGRVPEDDGGAVVDGQPPDAKSVSGTSVSAAVTTANARQLSWAQVEAMTGGFTSAIVGEGGFSTVYLARLAGSLAAVKVHRSSERLHRAFRQELDALLRVRHPHIVRLLAFCDQRDEGVLVLEFAPNGSLHEQLHGGGAGAAPMPWARRVPVALQVARALEYLHERCEPQVVHGDVKASNVLLDAGMGARLCDFGSARAGFSAAVAVAAAGPRPRAVFGSPGYVDPHYLRSGVVTKKSDVYSFGVLLLELLTGVQAFRDGRLLTASVAPRLAAAAAGDLVDRRLGCRYDAREAAAVLALAAACVRDKPGLRPSMADVSPADRSSQPAAAQVKPPRVSLGSHAHTEISPTELNCRCRRATGGTHARSSRMATTLTPTQRYAAGTLLALALRQAQIHQSEPLGSGPDDEERASSASGSSSSTISSTGSDTTSGAGLWTHDSRGLLRPVFRFLEIEPKAWAGMEETAASPDAAKHHIGAYPIVSFHSLVSQFISILFEEDGESSSDRLEQEIALAKAVDVMVMSLGSDTAPDENIKDEFKYSTACTYATLESTEAGSSENLLGIVKLSLENVPVNEHRKMVLLYALLSACIADKPVSQEEEDRKSSHFRKGYDARHRVALRLIAAWLDVKWIKMEAMEVMVACSAMAAAKEQEQERENASPRSKWEKWKRGGIIGAAALTGGALLAITGGLAAPAIAAGFGALAPTLGTLVPFIGASGFAAMAAAAGSVAGSVAVAASFGAAGAGLTGTKMARRIGKVKEFEFKPIGDNHNQGRLAVGILVSGFAFDEEDFWKPWEGWKDNLEKYGMYILQWESKHIIAVSTAIQDWLTSRLAMELMKQGAMRTVLSGLLAAFAWPATLLAATDFIDSKWSVAIDSVPNSLFSELMNCILSDQIRQEKCLQKCFLRDCKETEGLVERVVLLGAPVSVKGERWEPARKMVAGRFVNVYSRDDWILGVTFRASLLTQGLAGIQAIDVPGVENVDVTGLVDGHSSYLSAAQQILEHLELNTYYPVFVPLPEVNK

SEQ ID NO: 20609 - protein, 1335 aa, Zea mays
  VARIANT 653..1335: note = Derived polymorphism lacks residues 653 to 1335
MAAGGHLRPGSYLGDVSALSLLPSSPHPLLLAGTGSQLLLYEVGAARLVASFRVFDGVRVHGIEPRSGGPGCHSYTLALFGERRVKLFSLGFGVEADGGEARLELEQRLPGFDHWVLDTRFLEVDGLLAIGLSDNSVALWDLSKRALVTRVKSPEKCLLYSMRMWGDSVREFLVASGTILNEILIWKLAPQVLGSSMVCSNEGNTSDVNSPKIMNPDDSQHMAVHLGRLKEHEGSIFRIAWSSDGSKFMSVSDDRSARVWTLSFKSQGFANHTASHDNVEIIPKLTLFGHSARIWDCYVSDSMVITAGEDCTCCIWGMDGKLIKMFKEHIGRGIWRCLFDPSSLLVVTAGFDSAIKVHHLCNSIFHDIVDDKKVSGLNYDSEIFVVSSPSVSGQYGPLDSGIVYSLVHHSKSEYVRCLHFAEENVLYVATNNGYLRQAKLSNIEDVRWTKIIQVTEKAPVICMDVLTTYSNLSLNREDIIALGDGRGNVTIVRLTSSSSEPKLDLSFTWSAEKDRQLLGVYWCKALECSHIFTADPRGVLKLWNIRNVLFSSTDIINAPQMFPPVAVFEPSFGARIMCLDASPEEEILIAGDKKGNITAYPFPKILVLHDSGLMQQKMLPCCRFKGAHGISSVTSVHIEDSTSDHIEIHTTGGDGCICFFKYGRIAQKIEFFGMRQVKELGTIQSIYTNLASESQSSSTYAIGFTSADFIIWDLENETKMAQVSCGGWRRPYSYYLGTVPEYQNCFAFVKDHDIHIHRHWAPTHDKKLLAQVLHLQFHGREVHSLCFINPASHSDPENSSDLLIATGCEDGTVRLTGFLTGSSGKWHSSKLLGEHVGGSAVRATCFIPETYTVTYNSCNYSSNGISDGIAVEKDETFLLISVGSKQVLTTWILQPRNAENRQVYSSGLDIDSKQNSRNLENVDSAMSFQWLTTHMPPKLPRNRLKSGHIKQRVEEGNFSVVQPNMDVMDHMENDWRYLSVTAFHLKHPVLSRLTVCFVAVACSDATVVLRALLLPSRLWFDVAFLVPHASPVLVLRHIIINASHYKDDAGDRYLIASGSTDGSITFWNLTETIHGFMQLISETQPHMSIDYQKRPRTGRGSQGGRLRWRSLSYASKKRDGDMSSSDGSNPGSLNTAENSSEASGVENTQIVVHEASDSSKTEMPSSTQSCDIPELRPMHSLSGVHQSGVNCLHISFSTPDKSYCIISGGDDQSVQRFNFRVISSEDCLTTPARLNSHDNDTLKILYQHKVASAHSAAVKGIWTDGTWSFSTGLDQRVRCWKMGLAGQFTEYSHAIISVPEPETLDVFHDRAKRKYHIAVAGRGMQMVEFSPPEDD

SEQ ID NO: 20610 - protein, 99 aa, Zea mays
  VARIANT 47: note = Ancestral polymorphism is I, Derived polymorphism is V
  VARIANT 57: note = Ancestral polymorphism is K, Derived polymorphism is T
MAQQKVVLRISTMTDDRTKQKAMEAVADIYGIDSIAADVKENKMTVIGDMDTVAVAKKLKKLGKVDIVSVGPAKEEKKPDKKPEEKKPEAAAGKKDDKK

SEQ ID NO: 20611 - protein, 652 aa, Zea mays
  VARIANT 112..652: note = Derived polymorphism lacks residues 112 to 652
  VARIANT 188: note = Ancestral polymorphism is L, Derived polymorphism is Q
MRHCGARGAHHGAAGSVTNPHLRPPTGTPLACSTTLMRSRPALAAHLRRLLLLSPSAHLIIIRRAMASAAAAQAQPGGAPPATAEYEEVLGRLSSLITQKVRANSANRGNQWDLMEHYVKILELEESIARMKVIHVAGTKGKVKELAASSSQSCCLTFSLIRKFRNSDSIFVGMQCNHFHICIDCIYLQGSTCTFTESILRSCGFHTGLFTSPHLMDVRERFQLDGVNISEEKFLKYFWWCWNKLKEKTDDDIPMPAYFRFLALLAFKIFSAEQVDVAVLEVGLGGKFDATNVVKAPVVCGISSLGYDHMEILGNTLGEIAGEKAGIFKVLFNCFPVRLFKLYIDIFSYFFGPLCQKGVPAYTAPQPEEAMTALKQRASELGVSLQVVDPLEPHHLKDQHLGLHGEHQYINAGLAVALASTWLEKQGHKDTLPLNRTDPLPDHFIRGLSSASLQGRAQIVPDSQVNSEEDKDCSLVFYLDGAHSPESMEVCGKWFSHVTKDDTRLPSSLEQSHTSRSQKILLFNCMSVRDPMRLLPCLLDASTQNGVHFDLALFVPNQSQHTKLGSNTSAPAEPEQIDLSWQLSLQTVWEKLLQDKGINTTKSSDTSKVFDSLPVAIEWLRRNARENQSTSFQVLVTGSLHLVGDVLRIIKK

SEQ ID NO: 20612 - protein, 290 aa, Zea mays
  VARIANT 236: note = Ancestral polymorphism is G, Derived polymorphism is E
  VARIANT 233: note = Ancestral polymorphism is P, Derived polymorphism is L
MSVPASAQVPHTIRSAGSCCFRSSHQLSAQNLGRHRRWRGTGKKKILSTRGVLESRNGAHPGGLMKRRKVVEHIILLRAKPNISDAEEKDMLDYLYTSQYQMRGILAVSLGRIEDPNSDNFTHAVFMRFQQKQDIAEFQSNAYYSKVVDEHVKPVSYGSVSVDFESEVEDDIIPLFRRGEDFNYGVEFMLLVSFLKTASREATEDALASLDKLISQCSASIVQATCGCCLDRPDNGYSHAAVIRFPSSDELKLFRESEEYKDMWASKFRPIVERSLHLHFTVDPVGNQLM

SEQ ID NO: 20613 - protein, 50 aa, Zea mays
  VARIANT 46: note = Ancestral polymorphism is V, Derived polymorphism is F
  VARIANT 41: note = Ancestral polymorphism is R, Derived polymorphism is C
  VARIANT 36: note = Ancestral polymorphism is A, Derived polymorphism is S
  VARIANT 35: note = Ancestral polymorphism is R, Derived polymorphism is C
  VARIANT 32: note = Ancestral polymorphism is R, Derived polymorphism is C
  VARIANT 15..50: note = Derived polymorphism lacks residues 15 to 50
MAINEASGDALEGAEELDPALEEETPMEETICVTRAKLRRRTATEVPAGN

SEQ ID NO: 20614 - protein, 268 aa, Zea mays
  VARIANT 178: note = Ancestral polymorphism is R, Derived polymorphism is S
  VARIANT 172..268: note = Derived polymorphism lacks residues 172 to 268
  VARIANT 168: note = Ancestral polymorphism is P, Derived polymorphism is S
  VARIANT 14: note = Ancestral polymorphism is G, Derived polymorphism is S
MNMIRAVRRRFTVGHLATAKDPATLRHAAAELLATAIFVFAAEGATLSLGRMHHHDKGGGGLVAVALAHALALAAAVGCAANISGGHVNPAVTFGALLAGRICLVRSLVYWAAQLLGAVAAALVLRLATGGGHGVRAHVRLLCDGDGQSAEGPRRRRSAGGAARRGASGGGQRAGLRRAGGRRDESGARVRARRRGLPSLETPMGVLGGAHGRRRPLRRRLRAPRRRPGRRGGGARAELRRPPSCVEDYMHAGAAGRRRRPRSSESSE

SEQ ID NO: 20615 - protein, 369 aa, Zea mays
  VARIANT 129..369: note = Derived polymorphism lacks residues 129 to 369
MGVKQVLVRPRYGDGDGDDDGGTSSSSSTGRCDEDVVDQSPPPMSSCGRYLLHRVCRFDTLAGVAIKYGVEVADVKRANGLNADLQMFAHKTLRVPLHGSHQPAAAPPSLPSYSPRNHADRVASPFTGQITSLEVGRFGHTPLRTGDVGRAVFHREWTTRRPPKNAASMDPFLKPPRSTVSPSMSLLQGYYGLPPTPQENLTYEGTEMATYAQGHHRKARSLSSSEHGDGADDAEKPIRRRQKADSELTTGREDNGGCLLPRAGQGLALRPKSGSRPDGNGSQLDLSATWVPSYGDGLHTVKKSSSTPEFQDSDSISIASEWLKSKWNLKPDAFTLTLPPLPLLDSIPKPLLDNIPNSIAAWRNKAAKD

SEQ ID NO: 20616 - protein, 358 aa, Zea mays
  VARIANT 317..358: note = Derived polymorphism lacks residues 317 to 358
MQEAAAGAYPSYMEPEPEPEQTGASATVGVMGCRSPTCPPWLQAAIADIDQRVRALAVDDAAPPTEHSFAERAEEYYQKRPQLLALLADLHRRYLCLADRYCHHQHKREQPSLPASASSDCGSSDVDDRCSDAGSSLSFQAQHAPPRAGLPADEEEELLVAELVAAWVERDVLADEAARRAAESARRIQLQGSLVEVLESERLVLLGENARLGFRATAAEDEAAAAAADLGYARRRAAEMARLVLRLREDHRACVLGRRAEALQARVYALELRNRECCEATAAWEAEVQRLSAENRRLADQAMMARRKRKGGGGGWWARVRMAAAGWTPCAPAVTVAEQTKGKEDGKYHHYGGGCFCV

SEQ ID NO: 20617 - protein, 425 aa, Zea mays
  VARIANT 312..425: note = Derived polymorphism lacks residues 312 to 425
MTFMSCSAAVSNRTLCGGHGAVCARGVLALGSHSSRRRARRRHAVVFAKRRRRRLSKWQRPWWKTFFSDWNEDDESLAGWREEDELLEEIGANQELSDNEKFKVWMSKAEAIVEMREAQQDAMNAEERSWEDWISGGGTSGTGGGGDWNREDSLLDQITDDPAEIVRDKSIIQIFRDSINEDYEDMLFEDRVFMYASTNSAKFLALLIVVPWVIDFLVHDYVMMPFLERYVQKVPLAAELLDVRRSQKLQMVKDLNIEKARYRLEVEIGKSPPLSDEEVWHELREKAIELRDDWRLENRNAFANIWSDTVYGIVLFLLMCFNQSKVAMLKFTGYKVLNNISDSGKAFLIILVSDILLGYHSESGWHTLVEVILEHYGLEADEAAVTFFVCLVPVAFDVYIKYWVYKYLPRLSPSVGNVLDEIKRH

SEQ ID NO: 20618 - protein, 867 aa, Zea mays
  VARIANT 774..867: note = Derived polymorphism lacks residues 774 to 867
  VARIANT 756..867: note = Derived polymorphism lacks residues 756 to 867
  VARIANT 669..867: note = Derived polymorphism lacks residues 669 to 867
  VARIANT 626..867: note = Derived polymorphism lacks residues 626 to 867
  VARIANT 611..867: note = Derived polymorphism lacks residues 611 to 867
  VARIANT 213: note = Ancestral polymorphism is N, Derived polymorphism is I
MDLAINPFSSGTRLRDMIRAIRACKTAAEERAVVRRECAAIRAAISEGDQDYRHRNMAKLMFIHMLGYPTHFGQMECLKLIAAAGFPEKRIGYLGLMLLLDERQEVLMLVTNSLKQDLNHSNQFIVGLALCALGNICSAEMARDLAPEVERLLQNRDPNTKKKAALCSVRIVRKVPDLAEIFMSAATSLLKEKHHGVLISAVQLCMELCNASNEALEYLRKNCLEGLVRILRDVSNSSYAPEYDIGGITDPFLHIRVLKLMRILGQGDADCSEYINDILAQVSTKTESNKNAGNAILYECVETIMSIEATSGLRVLAINILGRFLSNRDNNIRYVALNMLMKAIAVDTQAVQRHRATILECVKDADVSIRKRALELVYLLVNDTNVKPLTKELVDYLEVSDQDFKEDLTAKICSIVEKFSLDRLWYLDQMFRVLSLAGNHVKDDVWHALIVLVSNASELQGYSVRSLYKALQASSEQESLVRVAVWCIGEYGEMLVNNLSMLDMEEPITVTEYDAVDAVEAALQRYSADVTTRAMCLVSLLKLSSRFPPTSERIKEIVAQNKGNTVLELQQRSIEFSSIIQRHQSMKSSLLERMPVLDEANYLVKRAASIQAAVPSVNSAPAVTSGGPFKLPNGVGKPAAPLADLLDLSSDDAPVTTSAPTTAPNDFLQDLLGIGLTDSSPIGGAPSTSTDILMDLLSIGSSSVQNGPPTANFSLPGIETKSVAVTPQVVDLLDGLSSGTSLPDENATYPTITAFQSATLRITFSFKKQPGKPQETTISASFTNLATTTFTDFVFQAAVPKFIQLRLDPASSSTLPASGNGSVTQSLSVTNNQHGQKPLAMRIRMSYKVNGEDRLEQGQISNFPAGL

SEQ ID NO: 20619 - protein, 655 aa, Zea mays
  VARIANT 375..655: note = Derived polymorphism lacks residues 375 to 655
  VARIANT 346..655: note = Derived polymorphism lacks residues 346 to 655
MMEVAGAQARAVPLLLRNTASLRTSVSVSCTGSRRSWVAAATAEGDETRGFDKVPMDTPGAYRLVDRDTGRSVIVWGGTDDSDEASMPSPAVLSRTTDRRHSQGVGGGTGIGNFGRFKAQKIKSLVTRSAHRKRESSNRSSTAWSDESSFNGSDDEEESYFERRKHVSDSERHPKMSSGSRDGRTRSAHSLSSVLSQYRGDDDTDFPGSEATSGSKRWGNVADVTYGRQNQKQREPLNFPQRKGPLDGGFFSRRSFKEIGCSDEMLGALRNFDFPRPSHIQAMAYGPILEGRSCVVADQSGSGKTLAYLCPIIQNLRNEEVQGLHKSSPRNPRVIVLTPTAELASQVLNNCRLISKSGVPFRSMVATGGFRQKTQLESLDQELDVIIATPGRFLYLLQEGFVQLANLRCVVLDEVDILFGEEGFEQVLHQLITVAPVTTQYLFVTATLPLDIYNKVVETFPDCEVIMGPGVHRTSSRLEEILVDCSGDDNEEKNPETAFSNKKTALLKIIEESPVRKTIVFCNKIETCRKVENALRRVDRKASQIKVLPFHAALDQAQRIANIKEFLNKQTADSMFLVCTDRASRGIDFANVNHVVLFDYPRDPSEYVRRVGRTARGASGNGKAFVFAVGKQVSLARRVMERNMKGHPLHDVPCV

SEQ ID NO: 20620 - protein, 428 aa, Zea mays
  VARIANT 31: note = Ancestral polymorphism is W, Derived polymorphism is G
  VARIANT 24: note = Ancestral polymorphism is T, Derived polymorphism is K
MGDPRPRRSPAAPTLADKLRKHSTWLLLLLWFAVSLALFLSATPPAAAPLRRSSFLRSKPRALAATGAAAAPPVRIYVYDLPARFNRDWAVADARCARHLFAAEVAVHEALLAYTGRAARPEDADLFFVPVYVSCNFSTPNGFPSLSHARGMLADAVDLVQAGMPYWNRSAGADHVFVASHDFGACFHPMEDVAIADGIPEFLKRSILLQTFGVQGHHTCQEVEHVVIPPHVPPEVEHELPEPEKAQRDIFAFFRGKMEVHPKNISGRFYSKKVRTELLQHYGRNRKFYLKRKRFDNYRSEMARSLFCLCPLGWAPWSPRLVESVLLGCIPVIIADNIRMPFPSVLQWPEISLQVAEKDVANLEVVLDHVVATNLSVIQKNLWDPVKRKALVFNRPMEVGDATWQVLRELEVLLDQSQRRRYGGSWRA

SEQ ID NO: 20621 - protein, 1407 aa, Zea mays
  VARIANT 1038..1407: note = Derived polymorphism lacks residues 1038 to 1407
  VARIANT 997..1407: note = Derived polymorphism lacks residues 997 to 1407
  VARIANT 990..1407: note = Derived polymorphism lacks residues 990 to 1407
  VARIANT 902..1407: note = Derived polymorphism lacks residues 902 to 1407
MFKLHRHRSSDRVGERFDFRFSNFRAVQAKAAADVMADTRHPTYIPSPLLHQCRIMLELTGVARIVPAISDRLFLSIVSVDNGKTIAKSTKVASRSGICQWPDTILEPIWFSKDQVSKEFQECQYRIIVSLGSAKSGILGEILLNLSNFLNLADPTAISLPLKRCNSGTVLQLKVQCLGTKSKLSGVRSLRDMAPRLDDRSPTPTNDELDNRSDCSDGMFNKGVHSSSENHLGGTYQDESGNMETGFSASGSHRSSNSGDSTADRTNFSPRVNSNGGLFVGRQDSASSYASYVSAGGGDDGLRSNNSSFSSRTSGPNLLQGSTPKTFSNDLSQLSMGASDSSKDFLEAAEETIEELRDEAKMWERHSRKLKADLEMLKKECSEKSKQHAELAVELSAAQAERDSYRHEIEELKSSLQDVNTRQTITGTPKRSDWIDLQKELEGEVKFLKESNTDLTIQLNRTQESNIELLSILQELEETIEEQRVEISKISKVKQTAYPENGLLVKKDREWAKKLSMKEDEITIPREKSDRALNIGNADGAASNAIYLDLEKENEILRAKIQELEKDCSELTDENLELIYKLKENGLTKGQVPHIANNNELQFKKLTSRIHQLEEDLRNKEMLRDDSFSESSMSNADEIQRKCADLELKVLNFRSQTCELEEKFRKCQEELEQRNLELSALRRKINGLHSNELEVCESGATWKYQARIADLEDTEPETDTLKARFELQLQENDDLRRSKVEMQNFISEFQAEKSQLEERLSASLKESSITSKCLDEVRKDILVLSSSIDSHVSTNKLLERNLVELESCKAELELHVSELEQENIELSERISGLETQLTYVTNEKESSELQLHDSRSLIINLKDKVECQQSEMETQRLQFKQKQQESQRRLCEAQDDSEVLRRSNCKLQSTVESLIEECSSLQNLIADLKRQKLELHGHLTQKEQELDESKKKNFEFSKTVEFLEAKLLSLQKDISSKEQSLLSELENIFQEHMEQEERINRAHFMLNKIEKEKTLEVENLEREVVSLAAQVSSTHEERESATLNAIQEVSVLRADNAKLEANLQDVSEQLRCYESQLEDLRKESKSKIKGLVDSLNASKQSEEMLTSDAEHMKKLMEAAKSNEDALRKTSNELELKLKSSDYVKQQMLEEISGLKLQVQKIMNLQDEVSKLQSSLDEAKFEKGKLEEFVRSVTEECQELKAQKAMLTDKVSYMQETLRNGEEENRNRIAMHAKLMRLESDLTALEASHVHEAELKNELSRIKRSNSEYQRKIQSLGQENEDLTRRVQIMEKGFERMSHAKENLGKQEIGGDNQEAIQSTIQLLEIKLAEALEENKIYRAQQKSSMSEGQPAGGDGKEGNTDRILQLEGELRDMKERLLNMSLQYAEVEAQRERLVMELKAIKKGRWF

SEQ ID NO: 20622 - protein, 311 aa, Zea mays
  VARIANT 53..311: note = Derived polymorphism lacks residues 53 to 311
MSESELAVIKPEVLKTYIWLQCFDGSIQQVEEEVAMFCPMICQEIVKNGTGSSKNHAIALPERVNPANLSLILDYCRFHQITGRSNMERKSFDEKFVRIETERLCELTSAADSLQLKPLVDLTGRALARIIEGKTPEEIRDIFHLPDDLTEEEKLEPLKNINDGPARIRLLNRLYAKKRKELQERHKLKDVQVQKEQKDERSLDELLSFINGDGGSGGRKATKSKKKNKRKDHVENPPKADSEPVNANPDMQDDAEYPFEDADLDDGLDPAMKEELDREVEAFAKRLDSVWKESHIGGNGSARRFPGFNHM

SEQ ID NO: 20623 - protein, 94 aa, Zea mays
  VARIANT 65: note = Ancestral polymorphism is C, Derived polymorphism is R
MPFFLDQRRDPRLLSVPPPQSHSRCSNWCSALPLSLELSCPRKCSQLLPAAPHRSTPATAARCVCAWLGACALCGGVESWAWLWCTSNVVHPLI

SEQ ID NO: 20624 - protein, 325 aa, Zea mays
  VARIANT 293: note = Ancestral polymorphism is E, Derived polymorphism is K
  VARIANT 234..325: note = Derived polymorphism lacks residues 234 to 325
  VARIANT 224: note = Ancestral polymorphism is T, Derived polymorphism is I
  VARIANT 148: note = Ancestral polymorphism is G, Derived polymorphism is D
  VARIANT 142..325: note = Derived polymorphism lacks residues 142 to 325
  VARIANT 141: note = Ancestral polymorphism is G, Derived polymorphism is W
  VARIANT 99..325: note = Derived polymorphism lacks residues 99 to 325
  VARIANT 90: note = Ancestral polymorphism is G, Derived polymorphism is R
  VARIANT 34: note = Ancestral polymorphism is R, Derived polymorphism is C
MFGRTPKKSDNTRYYEILGVSKDASQDDLKKAYRKAAIKNHPDKGGDPEKVSARAGHFVWLRPCCYDGVSSCAGCQGSGFKVQIWQLGPGMIQQMQHLCNECKGSGETISDKDRCPQCKGDKVVPEKKVLEVVVEKGMQNGQKITFPGEADEAPDTATGDIIFVLQQKEHPKFKRKGDDLFHKHTLTLTESLCGFQFVLAHLDNRQLLIKSNPGEVVKPGSFKTINDEGMPMYQWPFMKGKLYIHFSVEFPDSLSPEQCKALEVVLPPKPVSQYTDMELDECEETMPYDVNIKEEMRRRQQQHQEAYDEDDDVPSGGQRVQCAQQ

SEQ ID NO: 20625 - protein, 439 aa, Zea mays
  VARIANT 234: note = Ancestral polymorphism is T, Derived polymorphism is I
MEPGLASRVARSAAQPLSGCLSRHSLSPWLKIQNHIYPMPSLCHKVPSTGKCHASMTTSYMETSDVTDLDWENLGFGLIETDFMYVAKCGTDGIFSKGEVLPFGPIALSPSAGVLNYGQGLFEGLKAYRKTDGSILLFRPEENAIRMLSGAERMCMPAPTVEQFVDAVKQTVLANKRWVPPTGKGSLYIRPLLIGSGAVLGLAPAPEYSFIIFVSPVGNYFKVRIAFPFTSNSTKIFCFNNAGIYVVCHFAFVHFILQEGLSPINLIVEDKFHRASPGGTGGVKTIGNYASVLKAQKIAKGKGYSDVLYLDAVHDKYLEEVSSCNIFVVKDNVISTPAIKGTILPGITRKSIIEVAQSKGFKVEERLVCVDELINADEVFCTGTAVVVSPVGSVTYMGKRVEYGNQGVGVVSQQLYKSLTSLQMGNVEDWMGWTMQLNQ

SEQ ID NO: 20626 - protein, 357 aa, Zea mays
  VARIANT 3: note = Ancestral polymorphism is M, Derived polymorphism is K
MEMTGSLPVPSVQAMVAAGRHAPVPPRYLRPDLAADVVVADDATTIPIIDFQRLLLVDPEESARLHAACQDWGFFQLINHGVPDDVMEAMKASIQSFFALPAEAKQQYRQQAGQLEGYGQLFVVSEDQKLDWADVLYLNTQPPEHRNLSFWPAGESFRQTLDTYSAAVKHVADRLLGAMYMNLGLQLSIMDMDPERGAGIQSVRMNYYPPCAEAADKVLGFSPHSDSDLLTLVLQVNQLQGLQIKRPPDGGGAWAWLPVTPLQGAFVVNVGDVLEIFTNGRYRSVEHRALVNAHTERLSIAAFHSPSIHATIGPLPELLGDQEVPKYKTLDHQSFITLFFSAKLQGKSFLERMKKLS

SEQ ID NO: 20627 - protein, 330 aa, Zea mays
  VARIANT 68..330: note = Derived polymorphism lacks residues 68 to 330
  VARIANT 218: note = Ancestral polymorphism is N, Derived polymorphism is I
MPALPAFPLTRRPSDARRRGRLVLSLVVFVAVSAAAALAYLSFPSAGRTSPPAVRTEADCCRGMEGLELWGPAVKWGSDHRLPSAAACCAACKAMCPHPKDGACRCDSWVFCGDERKCKDRLGECWLKKQKDVMAPAVIAKGEDVMWTSGLIFGKGEGIVGLETNLGTLHIQLLPGCAPRSVDHFIELLGLRNCAGCRFYRAEGRGNVWDAKGDHEKNVAFGPPYALLQGTLEVDGVPFKKIPREACPAVKRGSVAWVGSGPEFLISLADHEEWRDAYTVFGNVLPMDMAIAEEMTLLPTSTDVWSNVKVKVLKDPVYFKVKRSSNASAV

SEQ ID NO: 20628 - protein, 227 aa, Zea mays
  VARIANT 163: note = Ancestral polymorphism is G, Derived polymorphism is S
  VARIANT 138: note = Ancestral polymorphism is G, Derived polymorphism is R
  VARIANT 70..227: note = Derived polymorphism lacks residues 70 to 227
  VARIANT 68: note = Ancestral polymorphism is E, Derived polymorphism is K
  VARIANT 59: note = Ancestral polymorphism is L, Derived polymorphism is M
  VARIANT 56: note = Ancestral polymorphism is V, Derived polymorphism is M
  VARIANT 14: note = Ancestral polymorphism is T, Derived polymorphism is M
MAGADDLKVLGLWTSPFVIRVRIVLNLKGLAYEYVEDDLSNKSALLLSSNPVHKTVPVLLHAGRPVNESQIILQYIDEVWAGTGPAVLPRDPYERAAARFWAAYIDDKVKSAWLGMLFECRDEGERAEAVARAGEALGTLEGALRGKPFFGGDGVGFVDAVLGGYLGWFGAVGRIIGRRLIDPAKTPLLAAWEDRFRAADVAKGVVPDDVDKMLAFLETLLANYYSK

SEQ ID NO: 20629 - protein, 235 aa, Zea mays
  VARIANT 207: note = Ancestral polymorphism is A, Derived polymorphism is P
  VARIANT 194: note = Ancestral polymorphism is L, Derived polymorphism is Q
  VARIANT 166: note = Ancestral polymorphism is V, Derived polymorphism is F
  VARIANT 116..235: note = Derived polymorphism lacks residues 116 to 235
MGGEEGGDGLKLIGQYGSAFVTRVKLALSLKGLSYEYVEEDLRNKSALLLSSNPVHKAVPVLIHRGKPICESQVIVQYIDEAFAGIGPPLLPADPYERSVARFWAAFIEDKLVSPWDRVFRAKTEDEREEAMKQMLAAVDALEGALKEGRPRPFFGGDSVGYVDVVLGGAVSYAKGHDALFGSELIDAAKTPLLAAWMERFCELDAAKAVLQDVDRVVQYGKMLIAKNAAATRQA

SEQ ID NO: 20630 - protein, 241 aa, Zea mays
  VARIANT 199: note = Ancestral polymorphism is A, Derived polymorphism is T
  VARIANT 185: note = Ancestral polymorphism is G, Derived polymorphism is S
  VARIANT 132..241: note = Derived polymorphism lacks residues 132 to 241
  VARIANT 122: note = Ancestral polymorphism is T, Derived polymorphism is R
  VARIANT 45: note = Ancestral polymorphism is E, Derived polymorphism is D
  VARIANT 37: note = Ancestral polymorphism is E, Derived polymorphism is V
  VARIANT 9: note = Ancestral polymorphism is L, Derived polymorphism is P
MAGDGELKLLGMWASPFVLRARLALSFKGLKYEYVEEEIFGNKSELLLESNPVHKKVPVLIHNGKAICESQIIVQYISEVYDGTGPSLLPVGAYDRAVARFWAAYVDDKVFSSFMMMIMGKTDDEKAEGRKQLFAAAETLEGALKECSCSKGRPRPFFGGDSVGYVDIALGGFVAWVQTRDLLSGLEHFDADKTPLLATWLERFCALNETKAVMPDVMKLLEFSKKRQAQADAAAAAVVLR

SEQ ID NO: 20631 - protein, 401 aa, Zea mays
  VARIANT 294: note = Ancestral polymorphism is P, Derived polymorphism is S
  VARIANT 240: note = Ancestral polymorphism is R, Derived polymorphism is Q
  VARIANT 175: note = Ancestral polymorphism is G, Derived polymorphism is S
  VARIANT 161: note = Ancestral polymorphism is V, Derived polymorphism is A
  VARIANT 33..401: note = Derived polymorphism lacks residues 33 to 401
MAGSLHLPVVDLALPDLRAAAESIRQVTPLDPQAPEKQHPERMRLRAYLVAQACVEHGFFYVTNHGVDRGLLEAVFAESKRFFDLPMEDKMALLRGANHRGYTPPYAEKLDASSQFVGDLKESFYIGPLDDGDMHNDVNQWPSEERLPSWKETMKLYFAAVLDTGTRILSLVALGLDLDADFFHKIGALKCPSTFLRLLHYPGEVHESDSGNYGASAHSDYGMITLLVTDGTPGLQVCYRFSKSSVHHCLVLFSFVANRSWIISCHPQRNMCSCLEIQNNVFIYCHVYPYIMAPYAISVQICREKDRNPQLWEDVHHIDGSTLHRVVAIGKERYSFIVRILRSIMCLYTSFWTYQVAFFLDPNPDTLVQCLESCCSEACPPRFPPIKSWDYIAGRLNSTYK

SEQ ID NO: 20632 - protein, 554 aa, Zea mays
  VARIANT 498: note = Ancestral polymorphism is S, Derived polymorphism is F
  VARIANT 249: note = Ancestral polymorphism is A, Derived polymorphism is D
  VARIANT 241: note = Ancestral polymorphism is G, Derived polymorphism is D
  VARIANT 232: note = Ancestral polymorphism is P, Derived polymorphism is S
  VARIANT 192: note = Ancestral polymorphism is A, Derived polymorphism is D
  VARIANT 184: note = Ancestral polymorphism is A, Derived polymorphism is T
MSLGTCPAAAGDATAEELLQRARGLVPPALAAARAATGFGGRWKAIAARLEKVPPCLSDLSSHPCFSKNSLCRELLQSVAATLAEAAELGARCHEPPKAGKLQMQSDLDALAGKLDLNLRDCSLLVKTGVLSDATVPAAPAACAQADVRELLARLQIGHAEAKHRAVDGLLDALREDEKSVLSALGRGNVAALVQLLTATAPKVREKAATVLCLLAESGSCEGLLMSEGALPPLVRLAESGSLVGREKAVITLQRLSMSADIARAIVGHSGVRALIDMCQTGDSITQSAAAGALKNISAVPEVRQALAEEGVVRVMVSLLDSGVVLGSKEYAAECLQNLTSSNDSLRRAVVSEGGLRSLLAYLDGPLPQESPVAAVRNLVSAVSADSLVSLCVLPRLVHVLRDGSVGAQQAAAATICKMSSSMDMKRLVGEHGCIPLLVRLLEAKSNGAREAAAQAVASLMGCPPNARDMKKDEKSVANLVQLLDPSPQNTAKKYAISCLLALSTSKRCKKLMISHGAIGYLKKLSESEKDVAGAKKLLEKLDRGRLRSLFGRK

SEQ ID NO: 20633 - protein, 356 aa, Zea mays
  VARIANT 202..356: note = Derived polymorphism lacks residues 202 to 356
MERLLWASTQALGCGGKRDEAGLVGQLGEWLCRAALPPPRVCGAPGGPPVTVRRVRLRDGRHLAYEESGVPKEVARYRIIFSHGFAGSRLAASLFQEVAEELGVYMVGFDRAGYGESDPNPCRSVRSAALDMEELADALGLGDRFYAVGVSLGCHAMWSALRYIPHRLAGAAMLAPVVNYWWPGLPAGPAAEAYARQARGDQWALRVAHHAPGLLHWWMAQRWLPTSTVVDNTTHLPNGRDAEVRRALAADGTLRRKREAATQQGVHESYHRDMAVMFGRWEFDPMDLPEPPCPVHLWQGDEDGLVPVVLQRHVAGTLAWVNYHELPGTGHFLSAVPGLGDTVLRTLFGSSAALVA

SEQ ID NO: 20634 - protein, 466 aa, Zea mays
  VARIANT 73: note = Ancestral polymorphism is A, Derived polymorphism is T
  VARIANT 251: note = Ancestral polymorphism is V, Derived polymorphism is A
  VARIANT 314..466: note = Derived polymorphism lacks residues 314 to 466
  VARIANT 332..466: note = Derived polymorphism lacks residues 332 to 466
  VARIANT 382: note = Ancestral polymorphism is P, Derived polymorphism is H
  VARIANT 386: note = Ancestral polymorphism is P, Derived polymorphism is S
  VARIANT 416: note = Ancestral polymorphism is D, Derived polymorphism is A
MAETVDDKISYFQAVTGISDTDLCTEILAAHNWDLQLAVSSITANPSSPSAPVSTSSRDPAPSAPLADAEFVAPPPPIPPPPQQQPGIAWKLVTLPFYVVSGGASLVAGSFRLGAWVAGGVLSRSLSLLGLAGQAGSGDRLLELPPSAAEAADFVAEFERECGAGRGPRFVAEGFADALQRAQREFKLLFVYLHSPDHPDTPAFCGGCLCAEPVAAFIDENFVAWGGSIRRTEGFKMSNSLNASRFPFCAVVMASTNQRIVLLQQVEGPKSPEEMITILQRVVEECATSLVAARIEAEERLNNQRLREEQDAAYRAALEADQARERERIEEQERREREAVEAEKKRKEEEEAVARAAQEAAEKEAALARRRQEKAMALGAEPEKGPGVTRVLIRFPTGERKERRFHSSATVTSLYDYVDSLDCMKAENYSLVSNFPRVTYGPEKHSLTLEEAGLHPQASLFIEIEQ

SEQ ID NO: 20635 - protein, 867 aa, Zea mays
  VARIANT 650..867: note = Derived polymorphism lacks residues 650 to 867
MPASACTHLDSGCTRKYTRFKNIHAVYDEDYDRDPKRIKTEIIDSELSVGSVSDKDSEQDCDDVFLKDLRTQCKAKNWKTSKITSEGCGIKNQAKTEDDIDLDKPLIALKQKSPKTSLAKDNVKMNALRSSPCATKEEDTTSHRDKILSSSLIKATMQDPVLEKLGRKFAELEQSKVVIDCTEIVGDQICCVEVNNTAGALASCAKPDVLCEIKAEDTNYSEFGTSICSIKNPEHSSFKLQQKLVAGDDCVPQYCFMTRPAQLADVSDHPCEQTCSINNFDDITAAKAIEVSSLGLTDETSNHQKTSENLTDSDVCKSSTANGFIACSFNQSCHDLVDSDEHWNLFVHRNEPVKLLEELSSVDESCADTQSDLCGSTKMNCTSLEGVVQMQAEGQLDSIVCCGVRPKHMLLDMEIRHTETGVFTFDKTIDLAHPANFVAQDGRLESIVYDVLNNHAQRTASKNESSVGLPETAVSQSSLIDFTDNCVEDKRASVDKILPPNNLDWPLKDKLNSTTDYDICRPINDDEGSEEELVPQHQLYQSCSDKFNLSSAMPEISNAEDSQKISAGAQNSSATFLETDGRIKKPNFFVDEEPIEENTPKVLLSKRKIMSPMSQEKLCSALTGIDLCDGVQRFSKQQYMLSVSNIFTISIIIILISVAESKIIIEDHDKTTISLPQPAHMQDRSMLSTDRRLKSRTFVSPTSKGVLKSTGSPPHQHTTCSCTRSSPVVLDTEKAVEFSQRQMHDIENIAAKLIRSLKHMKSIVDESLSTEAYSLLPNFNIAEIRAASEDALEVERTTRKWLSIMNKDCSRFCKILSLAKKNDVSHPEAPRKQRKITFADEAGGMLCHVKVFKDGQASLLSECQSDL

SEQ ID NO: 20636 - protein, 274 aa, Zea mays
  VARIANT 104: note = Ancestral polymorphism is R, Derived polymorphism is L
  VARIANT 138: note = Ancestral polymorphism is V, Derived polymorphism is A
MDLFPDGAFVRLQNRVQQKYLYADDDGEGVSVRPYGHVFSLNAVWRVHRVLVAGNNIVLLQGVAYGRYLAISPGMAPPGYRGRRAVQRDYAGDNVGALMWNPLRIVDGERYVRLRNEFNRNLLRANGRYRTWHTAVTADIDDYGRLSTMMQWTVHRFQVYLGGRRGLFGRRMPEADERRTIRHVRANNEGDFDQDSNNWPTFNFFGRSVFNLRIQVGMRQPGGEVWAITMAVRPGSQGRLTPLVTDLPNSVDNMDIVVFDTGSQGAQNLVYPAI

SEQ ID NO: 20637 - protein, 375 aa, Zea mays
  VARIANT 350..375: note = Derived polymorphism lacks residues 350 to 375
MHPKLPRAARRLLCCGGAAASPEEDLSDEGRRSLRWVFSLRELRSATNSFNYDNKIGEGPLGSVYWGQVWDGSQIAVKRLNNAKNGTEAEFASEVEILGRIRHKNLLSFRGYCADGPERVLVYDFMANSSLYAHLHGPHSAECLLDWRRRASIAMGTARALLYLHRHATPKIIHGSVKATNVLLDSDFRAHAGDFGLARLIPDDGTDHEKIASSESQRGYLAPEYAAMSGKPTAGCDVYSFGIILLELASGRRPVEKSGSGKACGIRSWVLPLARQGRYDEIADSKLGDKFSGPELRRMVLVGLACTRSEPEKRPTMLQVVPLLKGESKETLVKLEREELFSPDSTTVSSQGTPTPDGSTDSAPPLKKDKELVGA

SEQ ID NO: 20638 - protein, 681 aa, Zea mays
  VARIANT 572..681: note = Derived polymorphism lacks residues 572 to 681
  VARIANT 581..681: note = Derived polymorphism lacks residues 581 to 681
  VARIANT 590..681: note = Derived polymorphism lacks residues 590 to 681
MPPSHRNFHFFITSVLVLLVTSAAALSVSTPVKLTCKYASVSHPTAEPLKPPTLTRPLAVTSHPPASVPLPSARPLSGGDAAGPYCTRVLLRGRPSRLRDPSRFFHALRLRANATRPHGLELCFHRNATVGPCQCAASQWQKMPKSGLWMQAISPYDHRILDFRMPTDPSRSVVVSTEEEFLLHRVVFLVLGLVLMVVAQTLSESVVFYYGGAMTIGIFLVILIILFQGMKLLPTGRKSSLAIFTYSSLVGMTTYFLHYLSGMLRSVLVEIGIAEDMHNPVFIGDPASGAGQAQENSGIEIHCDDEEEGSENAEHNNNLESPKEVDASAESREANGKSENLKDVTNLDKLQEKTGSSSSTEAIKALEGLMETNRDFEELKDLNGSSEELEEENNGNMEKLVELFLDKGLLDELKPIKVESQRRVRATLSIIDKMMISRVVKGGNGANDIHGNDGAQLTSIEEEGRTAEVSDDGDPAEVESCVAEKVELGHETTHDSTCTALDGGNDGSYFPWREELESLVRGGVPMALRGEIWQAFVGVGARRIPRYYNKLLDDRTETLDEKDLVDPVVNEQGSAPRKVTQPEKWKGQTEKLGIFVLVSVILAGAWFGYWGVRKFVLAEDGSVDEGVAYFVEWAILIVSAVMILQSSLDYLFAFTTLVLCGIIKVIARIEGKSKVLRYIFG

SEQ ID NO: 20639 - protein, 248 aa, Zea mays
  VARIANT 30: note = Ancestral polymorphism is P, Derived polymorphism is L
MIFGGAKAYGDNRRLKAAHCELHAAELAIPRYLQWLEFPIVFDCRDHPDRIPHPRTYPFIVEPIVGSKRLSKVLIEGGMAQHNPTDNIRGTHYPRATGRAPPAEYKSPLGLSDGTSRNSSRYGDFDEDYSSMNEDRQDGFGNLHGGYQRHAPRRNSPLAGSAKTLSQGVAMDSFYSTFHTTPERMEFTKEEYEAFTRKETKKAMKQLLSSPDFNRWALANADRISVAPPGGSYSSNNSQQRHRFLGLF

SEQ ID NO: 20640 - protein, 216 aa, Zea mays
  VARIANT 101: note = Ancestral polymorphism is V, Derived polymorphism is M
  VARIANT 104: note = Ancestral polymorphism is K, Derived polymorphism is T
  VARIANT 118: note = Ancestral polymorphism is L, Derived polymorphism is R
  VARIANT 144: note = Ancestral polymorphism is D, Derived polymorphism is G
MELELGLALPTRHRQPLAAGLLGGEAGARGTKRVFGEAFGSANKATLPLFLRDDDDGDRGGGGDRDGVGQHDPNTKKTKRLLVGWPPVKCARRSGGGGGYVKVKMEGVAIGRKVDVSLHGSYQDLLRTLRRMFPSATQRGAGAGADHEEEEEEVVVEEVASHERRRLHRPYVVTYEDGEGDWLLVGDDVPWEVFVKSVKRLKILARTAAGDGLAHC

SEQ ID NO: 20641 - protein, 191 aa, Zea mays
  VARIANT 127: note = Ancestral polymorphism is D, Derived polymorphism is N
MERDATAFCPPPQPAPAPASHAAVLGAGVAVAVAPAAGNGRGGGGGGKQYRGVRMRKWGKWVAEIREPNKRSRIWLGSYSTAEAAARAYDTAVFCLRGRAARLNFPDQLDGAQAAAAADSTEGARRNGAGLTAAAIRKKAAEVGARVDALHCGAGAGLAGGGASPLLLSHRRRPKNPDLNREPTPDTSDDE

SEQ ID NO: 20642 - protein, 276 aa, Zea mays
  VARIANT 63: note = Ancestral polymorphism is A, Derived polymorphism is D
  VARIANT 79: note = Ancestral polymorphism is Q, Derived polymorphism is E
  VARIANT 133: note = Ancestral polymorphism is W, Derived polymorphism is C
  VARIANT 142..276: note = Derived polymorphism lacks residues 142 to 276
  VARIANT 145: note = Ancestral polymorphism is V, Derived polymorphism is D
  VARIANT 249: note = Ancestral polymorphism is Q, Derived polymorphism is L
MARRCPHNRLTWPPAQPDSIHAAAPASTGVASRCTHRWCQGGDLTPTRRRPRRAFPSFCARRDREEAEPRRREMDPEKQRQHDGAVEADIERLPVDLLAHILSLLSPFRDLSMYVRRHPPHLAAVLCYKFVTWTRSAALLPCRADVRAGGVSRRWRWAVERSLASRRRLSFAGQRTGDDTAARLVRAAVNLRDLDISRSCWGCRITDDGLIKISSADCVGNLTSISLWGLAGITDKGVVRLVSRAYSLQHLNIGGTFITDESLYAVANSCANLKVF

SEQ ID NO: 20643 - protein, 607 aa, Zea mays
  VARIANT 251: note = Ancestral polymorphism is T, Derived polymorphism is I
  VARIANT 53: note = Ancestral polymorphism is S, Derived polymorphism is F
MGPAPREPMKQRVSRCLLRLSDRDTEAMAAAELDAIARELDADELPVFVAAVSDARPTDRTPLRRHSLRLLALVAGEHPRAAVAPLVPRLLAAALRRVRDPDSSVRAALVDAARAAAGAAASPPAALAPLADALLHEQDQCAQLAAALAAAAAVEASEPTDDLVAYLRGLLPRLYRLLRSTAFRAKPALISLIGTASAASGGGAASTAVPCLRDALTGDDWAARKAAAEALALLALQHGGDLVSHKSSCITVFEAKRFDKVKIVRESMNRMIEAWREIPDLDEEVCSFDVPPSSQSTSSLTDTADSLGSTSTPSITRRNSWPTNRQPPPDASHNVTNRKGSTPSIIGKKILPPSRRSTNQAKKFEGRVDVTVASDATPAKMVTEEKLLNEGSVRERLEARRVLFQKTGEKGYKKLAGPKSGSRVFPYSGDGDFEETAETEDAPDELQSAHKDEALWKIRLQLVQIENQHASLLNLLQKFMGSSQNGIRSLETRVNGLEMVLDEISRDLAASSGRTPNSEPDTIACCILSPKFWRRHDGGRYTSRYSVSDAPDYSEERKSSYKWDRHKFGVHGGSVTNPLAEPNDSSARSIAVSQEGRRRDSIQYRSR

SEQ ID NO: 20644 - protein, 789 aa, Zea mays
  VARIANT 462..789: note = Derived polymorphism lacks residues 462 to 789
MAMRDLCILTTLVSFLVSLSSVSAAYDHSYLARGSSISTQDVTTPILVSPNGAFTCGFYKVATNAFTFSIWFSWASGKTVSWTANRDAPLNGRGSRLIFHKKGALILVDYNGMVIWSTNTTASGSDRAMLLDSGNLVVMDTDGRHLWRSFDSPTDTLLPWQPMTRDTRLVSASARGLLYSGFYAFYFATNNILTLIYNGPETSSIYWPDPFHMPWDNGRTTYNSTRYGVLDQTGRFVASDQLKFEASDLGDETMRRLTLDYDGNLRLYSLNMTSGNWSVSWMAFPQLCKIHGLCGANSLCRYRPELESCSCLEGFEMVEPSDWSKGCRRKTNTTPFSFRKLTGTDLWGYDLNYSKLVPWLMCRNMCLNDTDCQAFGYRKGTGECYPKAFLFNGRDFPDPYNDIYLKTQEAVWSSPELAPGLRHACKVTEKEAYPLSQMFVGANSSFKFGYFLSSALTLLVIEVILIIVGSWIVYKWERRPEIMDEGYMIISSQFRRFSYKELQRATKSFQEELGSGTSGAVYKGVLDDGREVAVKKLSDMMQGEQEFRSELSIIGRIYHMNLVRIWGFCAEQTHKLLVSEFVENGSLDRYLVDYQDLTYVLQWSQRYNIALGVAKGLAYLHHEWIVHCDVEPENILLDKEFEPKIADFGLVKLLSRGTGAQMLSRVHGTRGYIAPEWALNLPITGKADVYSYGVVLLELVKGVRVSSWVIEGEGVEEMSIRCSAEILKEKLAAKDPSWLMEFVDCRLNGEFNYLQAATMLEIAVSCVEEERTKRPSMDHILKTLLSLVE

SEQ ID NO: 20645 - protein, 382 aa, Zea mays
  VARIANT 310: note = Ancestral polymorphism is A, Derived polymorphism is V
  VARIANT 186: note = Ancestral polymorphism is A, Derived polymorphism is T
MTTPLPLLLTAHSAAALLVLLGPTARSRKRLRRDEASSASDSEATDPDPDPDPDPDPAPEQEAPPPAPLPLPPTSLDDYPLAFRVSAPTFHFLSGLLEPLLSHPSSLPSPVLLALALARLASGLPYPALAELFGVPPSAPRAASRRLRRVLLANFRFWLAFPSDPTGAYSAPLPSCRGALCCARFAGPTGPLATQLVAGASSRVLSLTAGFRGDRTDLEVLRLSSLYQEAEHGKLLDSQQYLVGDGGGYPLLPWLMVPFPGPLVPGSPEAEFNAAHRAMCRPVRRVIRSLMGWGAIARLHEEESSRAAVACIGTCAMLHNVLLSREDYSALAPDVEEADSDLGGLHSQRDDAGAGAGLEIDGRALALRSALAATTRDLRAPD

SEQ ID NO: 20646 - protein, 120 aa, Zea mays
  VARIANT 77: note = Ancestral polymorphism is D, Derived polymorphism is N
  VARIANT 71: note = Ancestral polymorphism is A, Derived polymorphism is T
  VARIANT 13: note = Ancestral polymorphism is A, Derived polymorphism is T
MASRYSILLATTALAMLFAFGSCTTPLTFQVGKGSKPGHLVLTPNIATISDVEIKEHGGDDFSFTLKEGPAGTWTLDTKAPLKYPLCIRFATKSGGYRIADDVIPADFKAGTTYKTTLSI

SEQ ID NO: 20647 - protein, 178 aa, Zea mays
  VARIANT 107: note = Ancestral polymorphism is H, Derived polymorphism is P
MAAATATERPTAASSNNNNDLLRRLVLSLSLSTASKVIAKQHAQHKQHQQAAAGAFRCRTCGRAFPTFQALGGHRTSHKRSLVRARGLDLLLGARPGKGAAAARDVHRCTTCGAAFPTGQALGGHMRRHRAAAHDDEGEAAAAARAVIVNNALSSGEQQGEREVDDGARSSIRFFQFI

SEQ ID NO: 20648 - protein, 339 aa, Zea mays
  VARIANT 223..339: note = Derived polymorphism lacks residues 223 to 339
  VARIANT 49: note = Ancestral polymorphism is M, Derived polymorphism is K
  VARIANT 48..339: note = Derived polymorphism lacks residues 48 to 339
  VARIANT 38..339: note = Derived polymorphism lacks residues 38 to 339
  VARIANT 31..339: note = Derived polymorphism lacks residues 31 to 339
  VARIANT 30..339: note = Derived polymorphism lacks residues 30 to 339
MNEQGLGGLGGGRGAVQGHGREAMALLQHQQLQQQRRQLEEEDEVRRQMFGGVAAFPAALGHGQQVDYGEDAGGLGDSDAGGSEPEPPPERTRGGSGGGGGKRSRAAEVHNLSEKRRRSKINEKMKALQSLIPNSNKTDKASMLDEAIEYLKQLQLQVQMLSMRNGVYLNPPYLSGTIEPAQASQMFAAVGGGNITASSSGAVMPPVNQSSGLQVFDPLNPPRDQPLSFVLPNVDKTIQEAPFHLESSQFHPRPFRMPESSEMMLPGEVVAKHQLTSIQGRVSMPAKSDYEICATKCMTSSGQLRKWQPMRTEGKMTQFSNPADSLARRLPLYFPLLLQ

SEQ ID NO: 20649 - protein, 324 aa, Zea mays
  VARIANT 187: note = Ancestral polymorphism is S, Derived polymorphism is P
  VARIANT 212: note = Ancestral polymorphism is R, Derived polymorphism is S
MDEAAVDDLIRRLLEARGGRTPRNAQVTDAEIRRLCAAAKDVFLSQPNLLELEAPIKICGDVHGQYSDLLRLFEYGGYPPDANYLFLGDYVDRGKQSIETICLLLAYKIKYPENFFLLRGNHECASINRIYGFFDECKRRFNVRIWKIFTECFNCLPVAALIDDKIFCMHGGLSPELKSMDQIRNISRPVDVPDVGLLCDLLWSDPDKEIDRWGENDRGVSYTFGADVVAEFLQKHDLDLICRAHQVVEDGYEFFAKRQLVTIFSAPNYCGEFDNAGALMSIDNSLVCSFQILKPSEKKGKAGNGNMPKPGTPPRKIKISVTHI

SEQ ID NO: 20650 - protein, 612 aa, Zea mays
  VARIANT 1: note = Ancestral polymorphism is M, Derived polymorphism is R
  VARIANT 44: note = Ancestral polymorphism is G, Derived polymorphism is D
MTNAAGTAPHPTPPTPLQQQQHQPPKDQQQKALALNAFRLKGIGDRIRFHLKGMSVPPVAELAHLIYAFARGIDFAVSAGDIPLTAGDIPEILRKVYELRKETIIQSSLMILAISCKIPETFLEWSMRYYPRLKFERLITSIEAKVGYDILMADFFIERSLSRDEKIRLIVVQKENLDASSCVSSPPHVSFLVNGKGVDKRTNVSMHFKQEQGPQLPTDITKMLKYGANIIQGVGYFNANYIIAVAVVNDLTSFSAPKLDDYAQPITVYPADSDVLEGPSRVSLNCPIRRIKTPIKGRLCKHYQILEETGDDVTDVLVFADGSWKVVPAQDEKSDRHRGDTIQQAGDAVETGSPSRDVIDLINGNDDGDMQMDWASAPEDSKPVLNSQDLSVSDYLTDFPMTAQTEDLNRGDGNNGGSNMASTSRQNLLLPPTSGLGSSSLGTLESILPQNVLHPVITDAVSPSLETSSASGMQHVSQETHCGTVQLQPQIGPVHGSEVRRLPIPRNPRREPIGVQGLTVPPQNPGSSTRLQPNILNCPPPIPLSSPSSSTYQAHQVKNPDSVIASRNSGSGPLPRTPSVAAASLHLQSTARVIIFSSLCIIICSSFKHKIL

SEQ ID NO: 20651 - protein, 529 aa, Zea mays
  VARIANT 110: note = Ancestral polymorphism is A, Derived polymorphism is T
  VARIANT 172: note = Ancestral polymorphism is G, Derived polymorphism is D
  VARIANT 175: note = Ancestral polymorphism is I, Derived polymorphism is T
  VARIANT 196: note = Ancestral polymorphism is I, Derived polymorphism is N
  VARIANT 280: note = Ancestral polymorphism is T, Derived polymorphism is I
  VARIANT 288: note = Ancestral polymorphism is G, Derived polymorphism is D
  VARIANT 289..529: note = Derived polymorphism lacks residues 289 to 529
  VARIANT 298..529: note = Derived polymorphism lacks residues 298 to 529
  VARIANT 350..529: note = Derived polymorphism lacks residues 350 to 529
MRARWAVTLLLLAVLALTASAARLDLDDDDDSGVLDELLAIDEEAERGGLLDAEGAGEAVRRAQSMVLALDNDNARRAVEDHAELLLLGYAPWCERSAQLMPRFAEAAAALRAMGSAVAFAKLDGERYPKAAAAVGVKGFPTVLLFVNGTEHAYHGLHTKDAIVTWVRKKTGVPIIRLQSKDSAEEFLKKDMTFVIGLFKNFEGADHEEFVKAATTDNEVQFVETSDTSVAKVLFPGITSEEKFVGLVKSEPEKFEKFDGKFEEKEILRFVELNKFPLITVFTELNSGKVYSSPIELQVFTFAEAYDFEDLESMVEEIARAFKTKIMFIYVDTAEENLAKPFLTLYGLESEKKPTVTAFDTSNGAKYLMEADINANNLREFCLSLLDGTLPPYHKSEPLPQEKGLIEKVVGRTFDSSVLESHQNVFLEVHTPWCVDCEAISKNVEKLAKHFSGSDNLKFARIDASVNEHPKLKVNNYPTLFLYLAEDKSNPIKLSKKSSVKDMAKLIKEKLQIPDVETVAAPDNVKDEL

SEQ ID NO: 20652 - protein, 329 aa, Zea mays
  VARIANT 22: note = Ancestral polymorphism is P, Derived polymorphism is R
MMHAKSESDVTSLAASSPPRSPKRGVAAAGTGGGGGGYYVQSPSRESHDGGGGGYKSSSMQATPVYNNSPSESPSHPSYGRHSRSSSVSRFSGGLRGGGGGGRKVLNDKGWPECSVIEEEGPYEGLGAGDSGLSRRCQIVLGFLTFVLLFTVFCLVIWGAARPYEPEVVVKSLVMDDFYAGEGTDHSGVPTKLVTTNCSLHVSVYNPATMFGIHVTSGPIRLIYSEISIAVGQVRRYYQPRKSHRTVTAVIHGEKVPLYGAGGGLTLSTSAGGGAVPLTLDFDLTSRGYVIGRLVRVTHRAHVTCPVVVDARRTKPVRFSKKACAVYKA

SEQ ID NO: 20653 - protein, 356 aa, Zea mays
  VARIANT 167: note = Ancestral polymorphism is S, Derived polymorphism is C
MTMATASASLALMFACSLLLAGTAFSDDTIAIPLLERFKAWQAEYNRTYATPEEFQQRFMIYSENVRFIKTMNQLSTGSSYELGENQFTDLTEEEFKDTYLMKLDEQPPAAEAMPPTVGTMSTAGMSNGNNTGEAPNSVDWRTKGAVTRVKDQQQCGSCWAFATVASIEGVHQIKTGRLVSLSEQEIVDCDRGGNDNGCRGGSPRSAMEWVTRNGGLTTESDYPYVGSQRQCMSGKLGHHAARIRGYQAVQRNNEAELERAVAGQPVAVFVDASRAFQFYKSGVFSGPCDTTTVNHVVTVVGYGSTGSDSGGRKYWIVKNSWGQGWGENGYVRMARRVRAREGMCAIAIEPYYPVM

SEQ ID NO: 20654 - protein, 134 aa, Zea mays
  VARIANT 4: note = Ancestral polymorphism is G, Derived polymorphism is E
  VARIANT 7: note = Ancestral polymorphism is R, Derived polymorphism is Q
  VARIANT 16: note = Ancestral polymorphism is Y, Derived polymorphism is C
  VARIANT 32: note = Ancestral polymorphism is D, Derived polymorphism is G
  VARIANT 35: note = Ancestral polymorphism is A, Derived polymorphism is V
  VARIANT 38: note = Ancestral polymorphism is P, Derived polymorphism is S
  VARIANT 42: note = Ancestral polymorphism is Y, Derived polymorphism is H
  VARIANT 49..134: note = Derived polymorphism lacks residues 49 to 134
  VARIANT 50: note = Ancestral polymorphism is H, Derived polymorphism is Y
  VARIANT 53: note = Ancestral polymorphism is A, Derived polymorphism is T
  VARIANT 63: note = Ancestral polymorphism is D, Derived polymorphism is N
  VARIANT 65: note = Ancestral polymorphism is N, Derived polymorphism is I
  VARIANT 69: note = Ancestral polymorphism is R, Derived polymorphism is T
  VARIANT 88: note = Ancestral polymorphism is V, Derived polymorphism is F
  VARIANT 92: note = Ancestral polymorphism is A, Derived polymorphism is T
  VARIANT 93: note = Ancestral polymorphism is D, Derived polymorphism is N
  VARIANT 100: note = Ancestral polymorphism is F, Derived polymorphism is I
  VARIANT 101: note = Ancestral polymorphism is V, Derived polymorphism is M
  VARIANT 105: note = Ancestral polymorphism is A, Derived polymorphism is T
  VARIANT 111: note = Ancestral polymorphism is Y, Derived polymorphism is C
  VARIANT 119: note = Ancestral polymorphism is I, Derived polymorphism is N
MTFGQPRIGNPAFVVCFGEQVPRTIHVTHQNDIVAQLPPYYYYLSEWTYHHFAREVWLHESIDGNVVDTNETWVYGMSVADHLEYYSFTLHADSRGTYQFMIGTANQVYNYIHEVDGSIILLRYMQEPRALESM

SEQ ID NO: 20655 - protein, 298 aa, Zea mays
  VARIANT 126..298: note = Derived polymorphism lacks residues 126 to 298
MVYSENVRFIKTMNQLSTGSSYELGENQFTDLTEEEFKDTYLMKLDEQPPAAEAMPPTVGTMSTAGMSNGDNTGEAPNSVDWRTKGAVTPVKNQQQCGSCWAFATVASIEGVHQIKTGRLVSLSEQQIVDCDRGGNDHGCHGGYPRSAMEWVTRNGGLTTESDYPYVGSQRQCMSGKLGHQAARIRGYQAVQRKNEAELERAVAGRPVAVVIDASRAFQFYKRGVFSGPCNTTTVNHAVTVVGYGSTGSDSGGGRKYWIVKNSWGQRWGENGYVRMARRVRAREGMCAIAIEPYYPVM

SEQ ID NO: 20656 - protein, 135 aa, Zea mays
  VARIANT 62: note = Ancestral polymorphism is A, Derived polymorphism is V
  VARIANT 57: note = Ancestral polymorphism is G, Derived polymorphism is D
  VARIANT 34: note = Ancestral polymorphism is G, Derived polymorphism is S
MTIVTTDLSCGPSSKAKGGQPAVTVSGGDRQGRGKIEIKRIENTTNRQVTFSKRRNGPLKKAYELSVLCDAEVALVVFSSRGCLYEYANNMPLRVRQQQILHAARVSCLRCPNSEQVRSHLSRGKTAGSEGQLGS

SEQ ID NO: 20657 - protein, 365 aa, Zea mays
  VARIANT 326: note = Ancestral polymorphism is I, Derived polymorphism is T
MTMATASASLALVMLFACSLLLAGTAFSDDTIAIPLLERFKAWQAEYNRTYATPEEFQQRFMVYSENLRFIKTMNQLSTGSSYELGENQFTDLTEEEFKDTYLMKLDEQPPAAEAMPPIVGTMSTAGMSNGDNTGEAPNSVDWRTKGAVTPVKNQQQCGKVWVLMLLLGVCNGGVHRRCAPDKDRSSGVPVGARDRGLRPWGNDHGCRGGYPRSAMEWVTRNGGLTTESDYPYVGSQRQCMSGKLGHHAARIRGYQAVQRKNEAELERAVAGRPVAVVIDASRAFQFYKRGVFSGPCNTTTVNHAVTVVGYGSAGSDSGGGRKYWIVKNSWGQRWGENGYVRMARRVRAREGMCAIAIEPYYPVM

SEQ ID NO: 20658 - protein, 225 aa, Zea mays
  VARIANT 25: note = Ancestral polymorphism is R, Derived polymorphism is P
MGRGKVELKRIENKISRQVTFAKRRNGLLKKAYELSVLCDAEVALIIFSSRGRLFEFSTSSCIYKTLERYRSCSFASEASAPLEAELNNYQEYLKLKTRVEFLQTTQRNLLGEDLGPLSVKELEQLENQIEISLKQIRSSKNQQMLDQLFDLKRKEQQLQDANKDLRMKIEETSEENVLRLSSQDIGCSGSSGHGDEANQEHLQLALDPSLHIGYQAYMDHLNND

SEQ ID NO: 20659 - protein, 389 aa, Zea mays
  VARIANT 212: note = Ancestral polymorphism is D, Derived polymorphism is V
  VARIANT 209: note = Ancestral polymorphism is S, Derived polymorphism is I
  VARIANT 195: note = Ancestral polymorphism is P, Derived polymorphism is T
  VARIANT 59: note = Ancestral polymorphism is P, Derived polymorphism is S
MSTRTTAFTITYTATPSPNLPTPAAVPMETAAPARVQALAEAGVSRLPAQYIQPPEHRPTPSPSPIAAALSVPVVDLSTSTADDAVRAACADWGAFHVVGHGVPVDLLDAVRAAGLAFFRAPMEDKLRFACDPARGAASEGYGSRMLANDDSVLDWRDYFDHHTLPESRCDPARWPDFVPGYSMLLLPITREITPCTFYRDTIAKYSNSMKDLAQKLLCIISENLSLPPSYIQEAVGEVFQNITISYYSPCPQPDLALGLQSHSDMGAITLLIQDDVGGLEVLKDGMWIPVPALRDGILVILADQTEIITNGRYKSSVHRAVVNAEHARLSVATFYDPSKSRKICTAPQLVSENEPQKYRDVIYGDYVSSWYSKGPEGKRNIDALLIQH

SEQ ID NO: 20660 - protein, 271 aa, Zea mays
  VARIANT 220: note = Ancestral polymorphism is V, Derived polymorphism is M
  VARIANT 33: note = Ancestral polymorphism is R, Derived polymorphism is S
  VARIANT 25: note = Ancestral polymorphism is E, Derived polymorphism is D
  VARIANT 14: note = Ancestral polymorphism is S, Derived polymorphism is N
  VARIANT 8: note = Ancestral polymorphism is A, Derived polymorphism is T
MEQFPDGAHVRLRSRVHAGYLHADEDGVGVSLRRWRRRSMNVAWKVHRILHDGSTSVLLHSAAYGRYLAASHDPAPPGHLGLRVDLGDYDQDVDPILWKAVGSGDAGYVLLRHVSNRLLRANGRYRLWHRGVSVDDVDNQSTMMHWKVETIPTSPRPPALPAPTRRNRGSFRGLFLLHEEPVVLQRTVRFVRADNYGNFPDNWGTLQFQGRSVFELRAEMARRLNYALFFFRLLMCVRGGRYGRLTPLLIDLPRNEETLDIIVLFIGTQGD

SEQ ID NO: 20661 - protein, 135 aa, Zea mays
  VARIANT 105: note = Ancestral polymorphism is D, Derived polymorphism is Y
  VARIANT 98: note = Ancestral polymorphism is L, Derived polymorphism is H
  VARIANT 90: note = Ancestral polymorphism is Q, Derived polymorphism is E
  VARIANT 46: note = Ancestral polymorphism is L, Derived polymorphism is W
  VARIANT 42: note = Ancestral polymorphism is P, Derived polymorphism is L
  VARIANT 23: note = Ancestral polymorphism is C, Derived polymorphism is Y
  VARIANT 1: note = Ancestral polymorphism is M, Derived polymorphism is K
MITGDQHAIGKETTRRLGMSTKCTLPLLYSEQNKDESLASLPIDELTEKADGLSRVFPARPKTLRTTFLLLICTNQKDSLLILFMVANPQKLFYVQSLEKTVQDDFQKLSSLYLQVSTISQALNSMTRSRNLAGS

SEQ ID NO: 20662 - protein, 108 aa, Zea mays
  VARIANT 54: note = Ancestral polymorphism is C, Derived polymorphism is S
  VARIANT 43: note = Ancestral polymorphism is R, Derived polymorphism is C
  VARIANT 36: note = Ancestral polymorphism is C, Derived polymorphism is R
  VARIANT 35..108: note = Derived polymorphism lacks residues 35 to 108
  VARIANT 22: note = Ancestral polymorphism is D, Derived polymorphism is V
MGKRKSRPSKLTAKPKKQLETDFTCPFCSHPGSVQCDIFLKERRPFAVASCSICTESYATKAHALTEPIDVYSEWIDSCREANKGVVAPRPDLDGEAKRRRKTQDDGS

SEQ ID NO: 20663 - protein, 292 aa, Zea mays
  VARIANT 243: note = Ancestral polymorphism is D, Derived polymorphism is G
  VARIANT 156: note = Ancestral polymorphism is P, Derived polymorphism is L
  VARIANT 16: note = Ancestral polymorphism is V, Derived polymorphism is L
MDQIFDENHVRLRSRVRGTYLYADEDGVGVSLSRRRASLNAAWQVHLVQNFVLFRSAAYGRYLAVSREMAPPGHRGLRVVQRDYDELVLYAVAWRPIGAPLTVDDEAEADVVLRYGSTRYLRANGRHRRWHTGVTVDDNGGVRTTMMFWMVEEIPPRIEPPVLPLPPPPTMTTTPGLMSLLLRRAEPTSEPLRTIRYVRANNVGNFNPLGWATFQFYGRSVYLLLCRLAYQLGETISVGGERGVIGIALCVQAGNCARLTPLVTDLPWCDDPMNIVVLATDSYGESCFSVAS

SEQ ID NO: 20664 - protein, 304 aa, Zea mays
  VARIANT 157: note = Ancestral polymorphism is I, Derived polymorphism is T
  VARIANT 41: note = Ancestral polymorphism is A, Derived polymorphism is E
  VARIANT 15: note = Ancestral polymorphism is R, Derived polymorphism is C
MNNFPDGTHVWLQSRARRGYLHADEDGSGVSLSNSRATLNAAWQVHRIVHGGVDYVLLRSAAYGRYLALSASLAADGHRGREAAQRDFNEPQQLNVRWRAVSAGDGSGYVLLYNVLVSEERFLRANGRYRRWNSGVTVDVVGNGGRSTMMHWTVMEIPLRPAPPALPNPSTDLGVPTGLLQRRRTGRVTDRQRTIRYMRANDEGNFLGAETFRFFGRSVFNLRYEVAVKVNEDMLTITLCAHAGFYGRLTPLVVDLPRSQDPLDIVVLPNNSPAAMGLRHPNVDDPVPWEQDFYSNFMSDPRIQ

SEQ ID NO: 20665 - protein, 67 aa, Zea mays
  VARIANT 28: note = Ancestral polymorphism is H, Derived polymorphism is Y
  VARIANT 23..67: note = Derived polymorphism lacks residues 23 to 67
  VARIANT 21: note = Ancestral polymorphism is R, Derived polymorphism is H
MCLTCIPIHHLMVVLGPISCRKQCNIKHVGHTLYKKHHIKETGPFEQGMVQGCITGISSRPQVSYLL

SEQ ID NO: 20666 - protein, 53 aa, Zea mays
  VARIANT 6..53: note = Derived polymorphism lacks residues 6 to 53
  VARIANT 12: note = Ancestral polymorphism is M, Derived polymorphism is I
  VARIANT 13: note = Ancestral polymorphism is A, Derived polymorphism is P
  VARIANT 20: note = Ancestral polymorphism is P, Derived polymorphism is L
  VARIANT 25: note = Ancestral polymorphism is V, Derived polymorphism is A
  VARIANT 28: note = Ancestral polymorphism is F, Derived polymorphism is V
MAFNGWYNRLYIATGQGRTPGKQFVKKFQGSTYLFVKMDQCKATVYGSDLTNY

SEQ ID NO: 20667 - protein, 178 aa, Zea mays
  VARIANT 74: note = Ancestral polymorphism is R, Derived polymorphism is H
  VARIANT 29..178: note = Derived polymorphism lacks residues 29 to 178
  VARIANT 8: note = Ancestral polymorphism is A, Derived polymorphism is T
MCKKAAHAELAQSLFERLVILGVKPFRLQVQYRMHPCLSEFPSNCFYEGTLQNGVTVNERQSSGIDFPWLVPNRPMFFYVQMGQEEISASGTSYLNRTEAANVEKIVTTFLRSGVVPSQIGVITPYEGQRAYIVNYMSRNGSLRQQLYKEIKVASVDSFQGREKDYIILSCVRSNEHQ

SEQ ID NO: 20668 - protein, 382 aa, Zea mays
  VARIANT 354: note = Ancestral polymorphism is A, Derived polymorphism is T
  VARIANT 225: note = Ancestral polymorphism is M, Derived polymorphism is I
  VARIANT 213: note = Ancestral polymorphism is K, Derived polymorphism is R
  VARIANT 181: note = Ancestral polymorphism is K, Derived polymorphism is Q
  VARIANT 153: note = Ancestral polymorphism is P, Derived polymorphism is S
  VARIANT 51: note = Ancestral polymorphism is P, Derived polymorphism is S
  VARIANT 2: note = Ancestral polymorphism is P, Derived polymorphism is S
MPMRIERDLHMATGNGETSYTKNSRIQEKAMFQMKSVLEEATRAVCTALLPQTMVVADLGCSSGPNTLRFVTEVTRIIAHHCKLEHNRRHDHPPQLQFFLNDLPGNDFNNLFQLIEQFNKSSTTHKGDAATEALQPPCYISGLPGSYYTRIFPSESVHLFHSLFCLQWRSQAPEQLKGTQKSCLDIYITKTMSPSMVKLFQHQFQKDFSLFLRLRYEELVSGGQMVLTFIGRKHEDVFAGESNHLYGLLAQSLKSLVDEGVVEKEKLESFYLPIYSPSVGEVEAIVKQLGLFNMNHVKVFEINWDPYDDSEGDDVHNSIESGENVAKCLRAVMEPLVASQFGERILDKLFKEYARRVAKHLETEKTKHAVLVLSIEKAIIHV

SEQ ID NO: 20669 - protein, 511 aa, Zea mays
  VARIANT 393..511: note = Derived polymorphism lacks residues 393 to 511
  VARIANT 207: note = Ancestral polymorphism is M, Derived polymorphism is T
  VARIANT 205: note = Ancestral polymorphism is R, Derived polymorphism is S
  VARIANT 184: note = Ancestral polymorphism is L, Derived polymorphism is H
  VARIANT 68: note = Ancestral polymorphism is G, Derived polymorphism is A
  VARIANT 13: note = Ancestral polymorphism is P, Derived polymorphism is T
  VARIANT 12: note = Ancestral polymorphism is I, Derived polymorphism is L
MAATAYPTVVLIPLCVPGHLASMIEAGKRLLGRSRCPMSLTVLITQMTMSANLMSDVDDIMRREADSGLDIRFVHLPAVELPTVHHGLEDFMMRFIQLHATHVKEAVSGMSSPVAAVVVDYFCTTLFDVARELALPAYAYMPSGASMVALMLRLPALDGEVSGDFEAMEGTVDLPGMPPVPARLMPSPLMRKDPNFAWLVYHGKRFMEADGVIVNTVAELEPSILAAIADGLCVPRRRAPAVYPIGPVLPLKPPSAPGDGEQVVAQRHECVRWLDAQPPASVVLLCFGSMGGSFPSPQVREIADGLERSGHRFLWVLRGPPPPDGSKYPTDANVHELLPEGFLERTKGRGLVWPTWAPQKDILANPAVGGFVTHCGWNSILESLWHGVPMVPWPQFAEQHLNAFELVAVMGVAVAMQVDRKRGNFVEAAELERAVRCLMGGSEEKGRKAREKATEAKALSRNGVASGGSSDVSVQKLAREILHKHDDKGCATASGESMGSVVVPASPARII

SEQ ID NO: 20670 - protein, 257 aa, Zea mays
  VARIANT 100: note = Ancestral polymorphism is W, Derived polymorphism is C
MDFFPDRAFVRLRNRAYGTYLYADDDGAGVILKPQRGSLQTAWQVHRVWRHDRIYILLHSAAYGRYLAVSRVTTWVDTRHHANLTVQGVYETPEQDDVLWEAAYVDNVHVVMLQASHRLLRASTQNTTFFRYVFVDHPGHYYGTMMHWTQSATSARMIFYRRADDYGNVNPLSRSRCKFFGYSLLRLRAHLAMLLKEPIHRITLCVRAGSQGRPTPLVIDLPSNHQNIEIIVLTTLSPGESFAVFSALYVTVLNLVM

SEQ ID NO: 20671 - protein, 278 aa, Zea mays
  VARIANT 265: note = Ancestral polymorphism is P, Derived polymorphism is L
  VARIANT 184: note = Ancestral polymorphism is L, Derived polymorphism is S
  VARIANT 181: note = Ancestral polymorphism is L, Derived polymorphism is Q
MNRFPDRGFVRLRNRAYGTYLFADDDGAGVMLKPHRASLQAVWQVDRVVRRGRGYIVLRSAAYGRHLICATGTSWVDQSHEAYHTVQGNYNNPEQVDILWAPVHRLDNVHVVMLQGLDCQRILRACAPNTPFFRYVFVDAFQRSTNYGTMADWTVETIPVRPAPTVIPLPVPPLTEGVTPLIVLRRIKYVRADANGLFNPGAWLSWLFVGNSLLQLKQDLEMLLNVSNITMYVRAGPFARWTPLVIDLPSHPADMEIFVMTAMTPAMSIILAHPDFDA

SEQ ID NO: 20672 - protein, 270 aa, Zea mays
  VARIANT 119: note = Ancestral polymorphism is H, Derived polymorphism is Y
  VARIANT 109: note = Ancestral polymorphism is C, Derived polymorphism is S
  VARIANT 107: note = Ancestral polymorphism is V, Derived polymorphism is I
  VARIANT 52: note = Ancestral polymorphism is A, Derived polymorphism is T
MGCLLPDQAFVRLRNRTYGMYLYAHEDGAAVVLKPHRACLQTVWQLHRILRADRNLNYILFRSAAYGRYLTLSRETSPIYPGHSHQVNHTFQGVYETPMQDDVLWVIASADNLHAVIFHATYRVLRSSPSNMLLFGHAFVVGDIYHPVNYGTTIHWTVEEIPVRPEPPVIHLPTDCPFVTSGYLARGIIYMRADDHGNVNPRSRGCWLFYGNCLLQLRADLAKLLKEPADCITLCVRAGSQGRLTPLVIDLPSNDSDMEIIVLTTMSPVD

SEQ ID NO: 20673 - protein, 276 aa, Zea mays
  VARIANT 180..276: note = Derived polymorphism lacks residues 180 to 276
  VARIANT 165: note = Ancestral polymorphism is R, Derived polymorphism is W
  VARIANT 164..276: note = Derived polymorphism lacks residues 164 to 276
  VARIANT 137: note = Ancestral polymorphism is A, Derived polymorphism is S
  VARIANT 3..276: note = Derived polymorphism lacks residues 3 to 276
MECFPDQALVRLRSLVHDTYLHAENDGVGVSMNPHRAYLHTAWWVHRVRRDDRDYILLHSAAYGRYLALSRETETSRIYTGHHANLTVQSDYEATEQDDVLWEADTVTNVIVVMLHASHRDRLLSVSPSNTSAFRYALVVDSAYRVSCGSAAFWEQHATFRVLWRRIFYMRADNYGNIDSRSRRSYDLFSDSLWRLRDDLGRLLNEPIHRITLCTRAGSQGRLTPLIIDLPSNRHDMEIIVLTTMSPVDQTMTIKTLALILIVYTIAHMLTPAPVL

SEQ ID NO: 20674 - protein, 560 aa, Zea mays
  VARIANT 113: note = Ancestral polymorphism is H, Derived polymorphism is Y
  VARIANT 416: note = Ancestral polymorphism is T, Derived polymorphism is I
  VARIANT 435: note = Ancestral polymorphism is S, Derived polymorphism is F
  VARIANT 452..560: note = Derived polymorphism lacks residues 452 to 560
  VARIANT 463..560: note = Derived polymorphism lacks residues 463 to 560
  VARIANT 504..560: note = Derived polymorphism lacks residues 504 to 560
  VARIANT 511..560: note = Derived polymorphism lacks residues 511 to 560
MATPSAVGAAGVLGLEPEGIAEGSIDNTVVVASEQDSEIVVGKEQARAKVTQNIVFVTGEASPYAKSGGLGDVCGSLPVALAARGHRVMVVMPRYLNGTSDKNYANAFYTEKHIRIPCFGGEHEVTFFHEYRDSVDWVFVDHPSYHRPGNLYGDKFGAFGDNQFRYTLLCYAACEAPLVLELGGYIYGQNCMFVVNDWHASLVPVLLAAKYRPYGVYKDSRSILVIHNLAHQGVEPASTYPDLGLPPEWYGALEWVFPEWARRHALDKGEAVNFLKGAVVTADRIVTVSKGYSWEVTTAEGGQGLNELLSSRKSVLNGIVNGIDINDWNPATDKCIPCHYSVDDLSGKAKCKGALQKELGLPIRPDVPLIGFIGRLDYQKGIDLIQLIIPDLMREDVQFVMLGSGDPELEDWMRSTESIFKDKFRGWVGFSVPVSHRITAGCDILLMPSRFEPCGLNQLYAMQYGTVPVVHATGGLRDTVENFNPFGENGEQGTGWAFAPLTTENMLWTLRTAISTYREHKSSWEGLMKRGMSKDFTWDHAAEQYEQIFQWAFIDRPYVM

SEQ ID NO: 20675 - protein, 315 aa, Zea mays
  VARIANT 16..315: note = Derived polymorphism lacks residues 16 to 315
MVEAAAVSRSRPKIKQEPAETTAICKLVRVFCDDRDSTDSSGDEAAAGGGAGAAAGARKFLVEISVEKHQPRCNAMAPAGRAAGGGKRKAAAAGTPAEPRYRGVRRRPWGRYAAEIRDPHKGERLWLGTFDTAEEAARRYDSETRRLRGPSAITNFPATPDDRVPLPAPALSLHGVAAVGEHSSAEEESCDESQLVVGSPVSVLRAMPDETARATLPPKIADAAAGCATKKDAPDGRGGLSPFSADDALLPQLGEDAFSFGGVPFDDDLPTPQLGLDYLAADPALDLGSLPMWPGVDGCRFSDIGDDDLFSLPAL

SEQ ID NO: 20676 - protein, 247 aa, Zea mays
  VARIANT 163..247: note = Derived polymorphism lacks residues 163 to 247
  VARIANT 229: note = Ancestral polymorphism is A, Derived polymorphism is V
MEYDFRGGRSSSGPGPYGAPPGGAPGGGSSLYPRVGQPSHGGGGASTASPRAAPYHHGSGSGSGSGSSAPVVTPLAPTSFSSSSSSSSKVGIQVAIKPEFRITPPPQLPPEMVEIPRSTFNFDFEYERMILAEAEKENPNWTKFVMFETNSIDRITDFSSLILQARPASSGSGDPVVDKYVSMGLGRQAVSFAVLNYGDNPTKVKEFVKSYSILHEMGFTSPNVPELLAIHDNDPDKVIQRLLSSPS

SEQ ID NO: 20677 - protein, 383 aa, Zea mays
  VARIANT 230: note = Ancestral polymorphism is P, Derived polymorphism is L
MQIGCRGTMRTAWPLLLVATALLSTSAARARRTCRFPAVFNFGDSNSDTGGFWAAFPAQQGPFGMTYFGRPAGRASDGRLVIDFIAQAMGLPLLSPYLQSIGSDYRHGANFATLASTALLPNTSVFVTGTSPFSLGIQLNQMKEFRNRVLASKGNNGQLPGSEILGDALYTIDIGQNDFTSNLGSLGVESVKRSLPSVVSQISWTIQDLYSSIGARSFMVFNMVPVGCYPAFLAGLPRDSKDLDEFGCVKSYNGGVTYYNQLLNDSLAEVRKTLQDASVVYVDKHAVTLELFQHPTAHGLKHGARACCGYGGGTYNFDRDVYCGDSKVVNGEAATAGACADPQNYVSWDGIHATEAANSRIAYAVISGSYSYPPFDLSKLCSP

SEQ ID NO: 20678 - protein, 178 aa, Zea mays
  VARIANT 20: note = Ancestral polymorphism is W, Derived polymorphism is R
  VARIANT 27: note = Ancestral polymorphism is A, Derived polymorphism is T
  VARIANT 50: note = Ancestral polymorphism is A, Derived polymorphism is V
  VARIANT 67: note = Ancestral polymorphism is A, Derived polymorphism is V
  VARIANT 75: note = Ancestral polymorphism is G, Derived polymorphism is R
  VARIANT 87: note = Ancestral polymorphism is A, Derived polymorphism is T
  VARIANT 91: note = Ancestral polymorphism is A, Derived polymorphism is V
  VARIANT 92: note = Ancestral polymorphism is C, Derived polymorphism is Y
  VARIANT 96: note = Ancestral polymorphism is P, Derived polymorphism is L
  VARIANT 98: note = Ancestral polymorphism is P, Derived polymorphism is L
  VARIANT 134: note = Ancestral polymorphism is G, Derived polymorphism is E
MLSFANYSGDADSKIVREVWARLLDQALTKGGVAEACSVVKRVGSKLDPADGACLPLDIICLHLEKAAVDRLSSGEELVGDDDVARALLGACKGLPGPVLVVYDHLLSNGAIIPSLNLKLRLLRSVLAILREWGISVIAHRLGTTSAGASFFLDGTFSLNQTGDYFIQMYFYQLFERC

SEQ ID NO: 20679 - protein, 136 aa, Zea mays; identical to SEQ ID NO: 3315
  VARIANT 39: note = Ancestral polymorphism is P, Derived polymorphism is L
  VARIANT 73: note = Ancestral polymorphism is R, Derived polymorphism is S
  VARIANT 86..136: note = Derived polymorphism lacks residues 86 to 136
  VARIANT 103: note = Ancestral polymorphism is G, Derived polymorphism is A
  VARIANT 111: note = Ancestral polymorphism is C, Derived polymorphism is Y
  VARIANT 116: note = Ancestral polymorphism is K, Derived polymorphism is N

SEQ ID NO: 20680 - protein, 118 aa, Zea mays
  VARIANT 103: note = Ancestral polymorphism is A, Derived polymorphism is T
  VARIANT 102: note = Ancestral polymorphism is A, Derived polymorphism is V
  VARIANT 99: note = Ancestral polymorphism is G, Derived polymorphism is R
  VARIANT 73: note = Ancestral polymorphism is P, Derived polymorphism is L
  VARIANT 71: note = Ancestral polymorphism is T, Derived polymorphism is I
  VARIANT 65: note = Ancestral polymorphism is S, Derived polymorphism is Y
  VARIANT 56: note = Ancestral polymorphism is S, Derived polymorphism is I
  VARIANT 47: note = Ancestral polymorphism is K, Derived polymorphism is E
  VARIANT 44: note = Ancestral polymorphism is G, Derived polymorphism is E
  VARIANT 41: note = Ancestral polymorphism is L, Derived polymorphism is Q
  VARIANT 37: note = Ancestral polymorphism is R, Derived polymorphism is H
  VARIANT 35: note = Ancestral polymorphism is T, Derived polymorphism is M
  VARIANT 34: note = Ancestral polymorphism is C, Derived polymorphism is Y
  VARIANT 19: note = Ancestral polymorphism is A, Derived polymorphism is T
  VARIANT 16: note = Ancestral polymorphism is V, Derived polymorphism is I
  VARIANT 11..118: note = Derived polymorphism lacks residues 11 to 118
  VARIANT 7: note = Ancestral polymorphism is R, Derived polymorphism is Q
  VARIANT 4: note = Ancestral polymorphism is A, Derived polymorphism is T
MAAATLRWVLQLHRDVPRAARFYSEGLDFSVNVCTLRWAELQSGPLKLALMHTNDSNLASQRVYSSMLSFTVPDINSAVSKLMALGAELDGPIKYEIHGKVAALRCIDGHMLGLYEPA

SEQ ID NO: 20681 - protein, 214 aa, Zea mays
  VARIANT 13: note = Ancestral polymorphism is A, Derived polymorphism is T
  VARIANT 65: note = Ancestral polymorphism is P, Derived polymorphism is L
  VARIANT 67: note = Ancestral polymorphism is R, Derived polymorphism is P
  VARIANT 94..214: note = Derived polymorphism lacks residues 94 to 214
  VARIANT 128: note = Ancestral polymorphism is Y, Derived polymorphism is H
  VARIANT 145: note = Ancestral polymorphism is R, Derived polymorphism is I
  VARIANT 169: note = Ancestral polymorphism is Y, Derived polymorphism is C
  VARIANT 190: note = Ancestral polymorphism is I, Derived polymorphism is N
  VARIANT 202: note = Ancestral polymorphism is R, Derived polymorphism is W
  VARIANT 207: note = Ancestral polymorphism is T, Derived polymorphism is I
MGKAKSKGPKFAAVKKIITKKTINKYKEDVLNHKKKDVDKEKLGRNVPQVSSALFFSYNTALGPPYRVIVDTNFINFSIQNKLDLEKGMMDCLYAKCTPCITDCVMAELEKLGQKYRVALSITFIYLHNLIYLPHRIAKDPRFQILACTHKGTYADDCIVERVTQHKCYIVATCDRDLKRRIRKVPGVPIMYITRHRYSIERLPEATIGGAPRI

SEQ ID NO: 20682 - protein, 254 aa, Zea mays
  VARIANT 85: note = Ancestral polymorphism is R, Derived polymorphism is W
MAEPRSSGARPSGRPTPNGPSRKERQEAASQRRRPPRPRTDKQAVGRPEPRVQAWQVQARILPSRYKEDVLNHKKKDVDKEKLGRNVPQVSSALFFSYNTALGPPYRVIVDTNFINFSIQNKLDLEKGMMDCLYAKCTPCITDCVMAELEKLGQKYRVALSITFIYLHNLIYLPHRIAKDPRFQRLACTHKGTYADDCIVERVTQHKCYIVATCDRDLKRRIRKVPGVPIMYITRHRYSIERLPEATIGGAPRI

SEQ ID NO: 20683 - protein, 118 aa, Zea mays; identical to SEQ ID NO: 20680
  VARIANT 90: note = Ancestral polymorphism is D, Derived polymorphism is N

SEQ ID NO: 20684 - protein, 214 aa, Zea mays
  VARIANT 44: note = Ancestral polymorphism is G, Derived polymorphism is D
MGKAKSKGPKFAAVKKIITKKTINKYKEDVLNHKKKDADKEKLGRNVPQVSSALFFSYNTALGPPYRVIVDTNFINFSIQNKLDLEKGMMDCLYAKCTPCITDCVMAELEKLGQKYRVALSITFIYLHNLIYLPHRIAKDPRFQRLACTHKGTYADDCIVERVTQHKCYIVATCDRDLKRRIRKVPGVPIMYITRHRYSIERLPEATIGGAPRI

SEQ ID NO: 20685 - protein, 347 aa, Zea mays
  VARIANT 293..347: note = Derived polymorphism lacks residues 293 to 347
  VARIANT 268: note = Ancestral polymorphism is G, Derived polymorphism is D
  VARIANT 248..347: note = Derived polymorphism lacks residues 248 to 347
  VARIANT 227: note = Ancestral polymorphism is R, Derived polymorphism is H
  VARIANT 213..347: note = Derived polymorphism lacks residues 213 to 347
  VARIANT 160..347: note = Derived polymorphism lacks residues 160 to 347
  VARIANT 35: note = Ancestral polymorphism is G, Derived polymorphism is S
  VARIANT 1: note = Ancestral polymorphism is M, Derived polymorphism is I
MLAPPVPEMSMETKHGGHEEESAMLPCVAFASEHGYKFFSLAHMRMLNSADVRPMPPVLGRRLVPSPYGGMVLATDVCYRHPCHLVDPFTGSRAPLPDLPIPFSEKDPVGCLSDEPRLRCARVTDDGLAWDWSPRGVMVARGDTTFFCEHGGERWMPVLQSKLGSPMTVNYRDGLFFVLELRTLKTTIIDAGTLQARTKIPAPPGFGDVDYAYLAPSTDDAILLVHRAGDSDGVVFTKAYRARHRDSQRPPRWRPVLDIGDRAVFVDGAHGFTVTADPTGAKANRVYVILAHQLTHPCGRLAVAYDVGFTDLTRPERMGRLNLNTGEVEPMWGRPHWIIPRNESGRR

SEQ ID NO: 20686 - protein, 458 aa, Zea mays
  VARIANT 148..458: note = Derived polymorphism lacks residues 148 to 458
  VARIANT 240..458: note = Derived polymorphism lacks residues 240 to 458
MGDTGLKPYILYLRQNKGFFYASLGIISHIIFVCGQISQNSWMATNVENPDVSTLKLTSVYIAIGIFSVFFLLFRSLAVVVLGVKTSRSLFSKLLNSLFRAPMSFYDSTPLGRILSRVSSDLSIVDLDIPFGFMFSVGAGINAYSNLGVLAIVTWQVLFVSVPMIVLAIRLQRYYLASSKELMRINGTTKSALANHLGESIAGAITIRAFQEEDRFFEKNLELVDKNAGPYFYNFAATEWLIQRLETMSDAVLSFSALIMALLPQGTFSPGFVGMALSYGLSLNISFVFSIQNQCQLASQIISVERVHQYMDIPSEAAEIIEENRPAPDWPQVGRVDLKDLKIQTRYAPLVLHGITCSFHGGDKIGIVGRTGSGKTTLIGALFRLVEPTGGKIIIDSIDITTIGLHDLRSRLGIIPQDPTLFQGTIRYNLDPLGQFSDQQIWEVLGKCQLLEAVQEKE

SEQ ID NO: 20687 - protein, 379 aa, Zea mays
  VARIANT 121: note = Ancestral polymorphism is A, Derived polymorphism is T
  VARIANT 90: note = Ancestral polymorphism is D, Derived polymorphism is G
MPMTIERDLHMATGNGETSYTKNSRIQEKVMFQIKPVLEEATRAAYSALLPRTMVVADLGCSSGPNTLRFVSEVIGIIARHCKEHDRRHDYPQLQFFLNDLPGNDFNNLFLLIQQFNKSMARNHKGEAAEALPPCYISGLSGSFYTRIFPSESVHLFHSLFSVHWHSQASEQLKDTKNKCLDIYITKNMPPSMVKLFQQQFEKDFSLFLKLRYEELVSGGQMVLTFIGRKHEDVFTREPNHLHGLLAQSLKSLVDEGLVEKEKLESFYLPFYSPSVGEVEAILKQVGLFNMNHVKVFEINWDPYDDSESDDVHNSIGSGENVAKCLRAVMESLVASQFGEHILDKLFKEFAHCIAEHLENEKTKHVVLVLSIEKAIIHV

SEQ ID NO: 20688 - protein, 111 aa, Zea mays
  VARIANT 4: note = Ancestral polymorphism is G, Derived polymorphism is E
  VARIANT 13: note = Ancestral polymorphism is A, Derived polymorphism is T
  VARIANT 42: note = Ancestral polymorphism is R, Derived polymorphism is C
  VARIANT 56: note = Ancestral polymorphism is M, Derived polymorphism is T
  VARIANT 83: note = Ancestral polymorphism is S, Derived polymorphism is N
  VARIANT 95: note = Ancestral polymorphism is A, Derived polymorphism is P
MATGRPVRLVLDASLLLDPSSTREAAAVALRPGVEELLRRLRYSNLTVAICYAEGMPTNEVLYLSTLLLHPFEVVSSEVHIDSIFFLLPYLPIMAHGVSILSCRLQRMASC

SEQ ID NO: 20689 - protein, 384 aa, Zea mays
  VARIANT 356: note = Ancestral polymorphism is V, Derived polymorphism is A
MLGGLYGDLPPPSSAGDDDKASTASVWSSATKMAPPTLRKPSTAFATPPSILRNQHLRPPKAAPTSVPAPSAVAAEPAAATSFQPAFVAVQPTVLEEYDPARPNDYEDYRKDKLRRANEAKLNKELERRRREDQEPEREREQREREAREREEKDYQSRASSLNISGEEAWKRRAAMSGGGAAARTPSSPPHGDGFAIGSSSSAGLGVGAGGQMTAAQRMMAKMGWKEGQGLGKQEQGITAPLVAKKTDRRGGVIVDESSSRPSEKKSRSVNFDGQPTRVLLLRNMVGPGEVDDELEDEVASECARYGTVSRVLIFEITQAYFPSDEAVRIFIQFERAEEATKAMVDLQGRFFGGRVVQATFFDEERFARNELAPMPGEVPGFFD

SEQ ID NO: 20690 - protein, 396 aa, Zea mays
  VARIANT 62: note = Ancestral polymorphism is T, Derived polymorphism is M
MQDGAGAEEGGIQTLLALLADGEEQARQLGEMVAAEDDGPWSSSRRAAAEHYRGAARRLQRTLGRAAAVARAFEAAAPGSSRGTDRSDDSPRSADESSGRTVAVDAQAQERQSTMCKRRKGLPRWTAKFRVPETSLEATPDDGFSWRKYGQKDILGAKFPRGYYRCTYRAAQACAATKQVQRSDADLCVFDVTYQGEHTCHQKPRRATAALSAPGGRSQTPPPPPTPPALPLEQQDPGMRLLGMGFRRVLRVETAGLALHDDPDDRGPASAPAAPFSFPSVPPPLLHAGEAATTTDSIPVAAAFSPPASSYGFSAPSYDCAPATCYGDVYDYDYEAPQGARMRGAESSELGEVVSRAMVAAPASFDYSSSLFHHQAELDPHLPFPPFGGPPHDPYQ

SEQ ID NO: 20691 - protein, 432 aa, Zea mays
  VARIANT 79: note = Ancestral polymorphism is W, Derived polymorphism is S
  VARIANT 6: note = Ancestral polymorphism is L, Derived polymorphism is Q
MASPDLLFNLWNLFYLGAYQATINIDVPGLDAAAAAERDAIVFRSYIALGSYQLEKNTRRASKRRFGDAQGPAVVAPSWVLLFPVAIVPNGFACVFNRPMEISTKVRPPKLREVIQVPKKVGRDPRFEPAYGFVDKEGCKLDEFLTLIDLVGMQRLQKMIKKSKDLDAIGEMKSRVTWINVESEILREHIKKEREAAKAGKRPYYLKKPEFRERKLMNKYNELKEECLQRSSVHAVPTLGNNELRGRLPAGLSGLRDLQYLILENNPMGGVPLPPELGNIPRLQELRLANSGYSGPIPDTFGLLSSLTTLSLENNNLTGRIPPGLSRLKRMYHLNLSKNGLDGVVPFDAAFLRRLGRNLDLSGNPGLCVTDRAVMPGVGVGVCGDDVVDCERSAAAESSVVGRVVRGEVTTGRWPAGLLRPAAVALCSCLLL

SEQ ID NO: 20692 - protein, 547 aa, Zea mays
  VARIANT 400: note = Ancestral polymorphism is S, Derived polymorphism is Y
  VARIANT 388..547: note = Derived polymorphism lacks residues 388 to 547
  VARIANT 383: note = Ancestral polymorphism is A, Derived polymorphism is V
  VARIANT 302: note = Ancestral polymorphism is P, Derived polymorphism is L
  VARIANT 262: note = Ancestral polymorphism is Q, Derived polymorphism is R
  VARIANT 250..547: note = Derived polymorphism lacks residues 250 to 547
MVNKGKVISLPCHAIIHVVHPQRPLLRSRHTDKPIVPPYGTPPPPPYVMYPPGTVYAHPSTPPAMHPFGHYPMPTNGHAETHGAAPSAPEMNGASFSRCDVYSFGVILWELAMLRMPWSGMNPMQVVGAVGFQDRRLDIPKEVDPLVARIIFECWQNESEGSDDNSQNDSHSKDNDGKEDGDSQNSMSYSASQGVVNQTMAMLPMQPGAMVGGVPSSTAANLNIGVDYWAAPGSAAVPAAHGKAPAGSARGDKWDERELKKQKRKQSNRESARRSRLRKQVLCNPLNWLKHSPTEMEGYICPGCLVLSMYLLMPGIAWDELEENLLQRVNSLFQSSDLDFWRKGRFLVRTNSQLVSYKAGMTRLSKLWRTWNTPELTLVSPIAVVGGQKTSLILKGHNLSIPGTQIHCTSIGKYISKEVLCSAYPGTIYDDSGVETFDLPRKPDLIIGRCFVEVENRFRGNRFPVIGGLCTLCFFEEDVVLTITTPRELNNYPRKDTFYLCAITASSDYTVKVLILLSHIYSLTVQVAIVQQFTDIFINIHQDFTRT

SEQ ID NO: 20693 - protein, 442 aa, Zea mays
  VARIANT 408..442: note = Derived polymorphism lacks residues 408 to 442
MPEARRLFDQMAQVGIQVNTITFNVLIDGYAKSGQMDQASATYREMQARGLVPDSCTFNIIAARAHKFGYAAQLVHDHDMFSSHMSADGLDMLVCRLCWDHRLDDAWELLLGAIEQGVPLRVTGFNALIAAYSKEGLHEEASELYRIMNKLGLAPSSSTFNYLIMGLCNQVRLDEAQLLLEHMVSKGYCLSTSFTISLDAYFRDGNAVGALKCWDDMSKIGLQTDFIAFSAYINDLSRLDYVNEAYQEFAEMTSRGILAKKGEQFIDVPYVVKGMDVSFSGILSFIEAAAIEKLKNNECTPADLCYSLQETIFAMLVEITERAMAHCDSKDILIVGGVGCNERLQEMMKIMCSERGGRLFATDDRYCIDNGAMIAYTGLLAYAHGMTTPLEESTFTQRFQTDEVHAIWREKEMPVLNNTHSDAIAEVSIDEASMATPIVIDY

SEQ ID NO: 20694 - protein, 564 aa, Zea mays
  VARIANT 7: note = Ancestral polymorphism is R, Derived polymorphism is W
MARAALRLGDRALALLVLVSVALLPLVSSDDGHKHCEGVVRGWADSSTGRVKDGDKLSLKDLLFFLHIPRTGGRTYFHCFLKKLYTNAQECPRSYDKLRFDPSHPDCKLVVSHDDYSLTSKLPRERTSVVTILRNPVDRVFSTYEFSVEVAARFLVHPNLTSAKLMTTRVLKKSRAVSTLDIWPWKYLVPWMREDLFSRRDARGIDKVHSSKKVNAYDVEDMVMPLHQYINDPVAHEIIHNGATFQITGLTNNSYFDGAHEVRHCARKHPDLGRIVLEVAKNRLDQMLYVGLTEDHEESARLFAHMVGAQVLLQSGTLSLDLKEDLHSETDSHPSMVEPGDEEASEHLNNTHGWQNNEALNSTSDEQGKGNVIHYLKGSIICMTVGKLMEAYETCIAKLRKSQSSRRKISLKKVEEANFSKEARKLVPEAILKQIISLNSLDMELYDHAKKIFTQEHLMLKAQQSMAGQHRQLAEQEVCSNSKSTTSLYKRRTVLIAIAREEEGNTIGYETNRSRTAEGWIGTMCSDGTCSPWVVVLLGLGITTILVLATLAVTTRKRTSKLKV

SEQ ID NO: 20695 - protein, 117 aa, Zea mays
  VARIANT 10: note = Ancestral polymorphism is R, Derived polymorphism is C
MAANPNHCLRRLASALSHGPRPPTPPASLLFPRLALSSSGPSTGPTPPPPDAVRKGEGEEAAEARAAEAEAEAGKEEEHEDDGGAHVSKATGEVGGPRGPEPTRYGDWERAGRCSDF

SEQ ID NO: 20696 - protein, 256 aa, Zea mays
  VARIANT 1: note = Ancestral polymorphism is M, Derived polymorphism is I
  VARIANT 22: note = Ancestral polymorphism is R, Derived polymorphism is G
  VARIANT 51: note = Ancestral polymorphism is S, Derived polymorphism is F
  VARIANT 59..256: note = Derived polymorphism lacks residues 59 to 256
  VARIANT 88: note = Ancestral polymorphism is P, Derived polymorphism is S
  VARIANT 192: note = Ancestral polymorphism is A, Derived polymorphism is S
  VARIANT 228: note = Ancestral polymorphism is T, Derived polymorphism is I
MPGSPKVFFASSASRRSGSLRRLLSTPVFSAACLLFGLAGFVAAALALSRSPSVTHSRCPDSSRPLSVSVAWDRSPGDGSAGGSAELPASLATGSRGRHKVMAFVGIFTGFGSIGRRRALRRTWLPADRQGLLRLEEATGLAFRFVIGKSNSKNKMAALNREVEEYDDFVLLDLEEEYSRLPYKTLAFFKAAYALFDSDFYVKADDDIYLRPDRLSLLLAKERSHPQTYIGCMKKGPVFTDPKLKWLVIVIWCDLI

SEQ ID NO: 20697 - protein, 387 aa, Zea mays
  VARIANT 296: note = Ancestral polymorphism is G, Derived polymorphism is W
  VARIANT 234: note = Ancestral polymorphism is T, Derived polymorphism is S
  VARIANT 215: note = Ancestral polymorphism is S, Derived polymorphism is F
  VARIANT 164: note = Ancestral polymorphism is E, Derived polymorphism is D
  VARIANT 130: note = Ancestral polymorphism is P, Derived polymorphism is L
  VARIANT 113: note = Ancestral polymorphism is P, Derived polymorphism is A
  VARIANT 90: note = Ancestral polymorphism is A, Derived polymorphism is S
  VARIANT 71: note = Ancestral polymorphism is G, Derived polymorphism is D
MSIAEASACRLQPMRIERDLHMATGDGETSYTKNSRIQEKTMFQIKPVLEEATRAVYTALHPQTMVVADLGCSSGPNTLRFVSEVIGIIARHCKEHGRQHDHPQLQFFLNDLPGNDFNNLFQLIQQFNKLTAINHKSEAAEALPPPCYISGLPGSYYTRIFPSDSVHLFHSLFCLQWRSEAPEGNKKTCLDIYITKTMSPSMVKLFQQQFQKDFSLFLRLRYEELVSGGQMVLTFIGRKHENVFTGESNHLYGLLAQSLKSLVDEGLVEKEKLESFYLPMYSPSVGEVEAILKQVGLFNMNHVKVFQTNWDPYDDLESDVVHNSIRSGENVAKCLRAVMQPLVASQFGEPILDKLFKEYARRVAKHLENEKTKHAIIVLSIEKAIHL

SEQ ID NO: 20698 - protein, 245 aa, Zea mays
  VARIANT 134..245: note = Derived polymorphism lacks residues 134 to 245
  VARIANT 127: note = Ancestral polymorphism is P, Derived polymorphism is S
  VARIANT 56..245: note = Derived polymorphism lacks residues 56 to 245
  VARIANT 54..245: note = Derived polymorphism lacks residues 54 to 245
  VARIANT 41..245: note = Derived polymorphism lacks residues 41 to 245
MAAPRARSLDPGVGGRGPIVDSFLSEEDEVGGAARVMARLQRELTELEEKKVAQEQRAAESLARVKAIRDGSRMGKLIVCSKVDDLCADELHELLHGLSRVDQEIRALLPPPAPARTAEAGGLMRGPPPPLHSQGRPRPPRRLPWVSSQSQPPSLPILRAPCTLPHPFSFTSPPVQQPSSLRAMSRMLLRHTQLSHRSSSMVPRLPNEAHQYSYQSQGVAAIAGNNISGQTSLLHSSPPLPTSAL

SEQ ID NO: 20699 - protein, 456 aa, Zea mays
  VARIANT 51: note = Ancestral polymorphism is P, Derived polymorphism is L
  VARIANT 89: note = Ancestral polymorphism is V, Derived polymorphism is L
  VARIANT 184: note = Ancestral polymorphism is P, Derived polymorphism is L
  VARIANT 272..456: note = Derived polymorphism lacks residues 272 to 456
MEPQQLRLRVLDTVRLSPPPAPAQPAVLPLSGLDADRNAFDVTFRTLRFFPPPPPSIDAHAVLPPVFEAALGLYPALAGRLRREGHVVVGAGAVPLVLAESGLSAVDVDTDCPGSALLDRLAPGDGDADADTPALALQVTRFACGGVALGMRVAHALCDGAGATKFLAAAARFAWGQGPPEVALVWERRELLGPRRPPRVATQVFDRVLALDGGVARRGPYGTDVERREQQRLLTRECFHVSNARVEALRARIADEAGVKFTSFEVVAAFIWRARVKANGSSPGEVVKMVYSMNISKLVDPPLPDGYWGNVCAPVYVALAACDLVSQPLAATAALVRKSKQAVDDEYVRSYVDFQEVHRHDGITAGAVSAFTDWRRLGHGEVDFGWGGPESVLPLSWRILGSTEPCFLIPYGARDERRREGFKVFIALQRTSLAGFREEIQELLLQPQQQGSAGKL

SEQ ID NO: 20700 - protein, 587 aa, Zea mays
  VARIANT 398..587: note = Derived polymorphism lacks residues 398 to 587
  VARIANT 304: note = Ancestral polymorphism is A, Derived polymorphism is T
MPEVAAPPPLPPLLAVASSPASAALPRARRRQQRRGWRRPRGLLVWGALVAFFFIMNWWMFSRLQDPSARPHFRLRRHAPRASATANSSLLTLEEVARAAKGKRAHTVMLTQLLALASHALAEAETRPEPKDLWEEPINATMWRPCSDQRDWKASEGTNGYIMISANGGINQQRVAICNAVTISRLLNATLVLPKFLYSNVWLDKSQFGDIYQEDYFIKYLKSDIQIVKDLPVELQSLDLEAIGSLVNDTNVMKEAKPSLYVKKILPILLRNRVVHFIGFGNRLSFDPIPSDLQRLRCRCNFHALRFVHKIQETGAVLVERLHGHRASSSPLKDNLLGQFAIKSDPSTNKSDASKYLAVHLRFEIDMVAYSLCYFGGGKDEEDELEAYRQIHFPVLSELKKTTKLPSAALLRSEGKCPLAPEEAVLMLAAIGFKRSTNIYIAGAEIYGGQYRMAAISRLYPALVTKETLLSPSELEPFRNFSSQLAALDFIACAAADAFAMTDPGSQFSSLVQGYRMYYGGGNFPTIRPNKRRLASILVKNATIEWNEFESRVRKLIQQTKQVHERPVARSIFRHPRCPECMCRTEH

SEQ ID NO: 20701 - protein, 705 aa, Zea mays
  VARIANT 420: note = Ancestral polymorphism is R, Derived polymorphism is Q
  VARIANT 37: note = Ancestral polymorphism is R, Derived polymorphism is C
MAEEDAAAAAGSPILDLPEPLLLHILGFLDDARSRHRAALACHRLLAAERATRAALSLRGDPRSNAFLFLRPTFCFPALERLDLSLVSPWGHPFLSSAAPSADAVAPSVTAEEVAEQNAFIAARLAYCFPAVSSLAVYCRDPTTLASLTPHWRSGLRSVKLVRWHQRPPGLDAGADLEPLLEDCPALRTLDLSEFYCWTEDIEPALAAHPAAAAALTELDLGLAGATDGFHAAELEAIAGSCPSLQKLVAPCVFNPRYIDFVSDDALLTIAARCPKLAILRLREPFEPAATGQREDAAITVAGLVSFFAALPALEDFTLDMRHNVLETAPAMEALARRCPRIKFLTLGGFQGLCKASWLHLDGVAVCGSLESLCIKGCLDLTDASLAAIGRGCGRLAKFAIHGCDLVTPAGIRRLATALRPTIKEVSILNCRLLDTAACLTALSPIRDRIESLEISCVWKEVEQPESVANGIAGCNHEDDDLGGEVSYESASKKCRYMELDDLVSWEMLRSLSLWFPAGEVLSPLISAGLDSCPVLEEISIKVEGDCRTCARPGPLFGLSDLAGFPVLAKMKLDLSEAVGYALTAPAGQMDLSLWERFYLQGIDSLMTLYELDYWPPQDKEVNQRSLTLPAVGLLQGCVGLRKLFVHGTTHEHFLTFFLKVPNLRDMQLREDYYPAPESDMMNTEMRAESWLRFEVQLNNRLIED

SEQ ID NO: 20702 - protein, 276 aa, Zea mays
  VARIANT 53..276: note = Derived polymorphism lacks residues 53 to 276
MPLATLSGCSTSFQTQLISRLSMRSRIGLRAVRHAAVSRSRQFKILTSLIVGRRAVASLLIPAGVTRSQPWMANLASLPHPRPMAARLASVRSKQPLMHSDSSEPHTATPSRCSQDALHKPWKPPSVKNLIRGHLRASASIAGAVSSTLCRMSSVKSSSAGSAAKKETSPATVIAASSRWPVAAGSKGSRSRRIASLGHLAAMVRSASSLTKSIYRGLNTQGATSFWRLGQDPAMASSSAAWNPSVAPARPRSSSVSAAAAAGCAASAGSMSSVQQ

SEQ ID NO: 20703 - protein, 128 aa, Zea mays
  VARIANT 19: note = Ancestral polymorphism is A, Derived polymorphism is V
  VARIANT 66: note = Ancestral polymorphism is E, Derived polymorphism is D
  VARIANT 69: note = Ancestral polymorphism is T, Derived polymorphism is M
MCKSINFAVGWGNEHPVQAQLIGEQGSRFVREELSMDYVYDYMMHLLTEYAGLLRYKPAVPEKAVEICTESVACPAQSLHRDCMMDSMESHVAGFDLCTLPPPFTDEEAKAIADREAEVLRKVEKMED

SEQ ID NO: 20704 - protein, 110 aa, Zea mays
  VARIANT 1: note = Ancestral polymorphism is M, Derived polymorphism is I
  VARIANT 5: note = Ancestral polymorphism is K, Derived polymorphism is N
  VARIANT 28: note = Ancestral polymorphism is C, Derived polymorphism is S
  VARIANT 53..110: note = Derived polymorphism lacks residues 53 to 110
  VARIANT 80: note = Ancestral polymorphism is L, Derived polymorphism is Q
  VARIANT 87: note = Ancestral polymorphism is R, Derived polymorphism is C
  VARIANT 105..110: note = Derived polymorphism lacks residues 105 to 110
MGKRKSAAKPPPKKRMDKLDTVFSCPFCNHGSSVECQIDMKNLIGEASCRICQENFSTTVNGMPNLYIVNGLTSVSVSTLLKATMMRELAPCDETVTYNRNVMCWYSRMP

SEQ ID NO: 20705 - protein, 326 aa, Zea mays
  VARIANT 109..326: note = Derived polymorphism lacks residues 109 to 326
MAHYQQGRRQQVDEYGNPVPGGHGVQGQQLGEAAGGYGVAGTGSYGGQQQAGYGPTGTGTHDAGGYDGSDHPGYGATGTGVDDAGGPGAYGAATGTRAHGTHGGVTGIQDGAAGLTGGGLHGATGMGTTTGTGAHGATGMLDTGVLGGGGHAATGMPAGHGTRPGATGVAGTGGAFPHAAEHKTGGGILRRSGSSSSSSSSSSEDDGMGGRRKKGLKEKIKEKMPGGHREGQGQATATGAYGGTGYVAGPTTGGPHEKKGVVEKIKEKIPGGHKDYDQHQHTTAATGGGGGYGGTTDTTYGTTTTEGTHEKKGFMDKIKEKLPGQH

SEQ ID NO: 20706 - protein, 326 aa, Zea mays
  VARIANT 235: note = Ancestral polymorphism is S, Derived polymorphism is L
  VARIANT 212..326: note = Derived polymorphism lacks residues 212 to 326
MFRRALLSSVSPLHGTVRIPSPSYSPIQALLAQWSRYASVVSSSAPPPPPPPPSPPQGPSRSSGGGPTSSSLNPAEVAKFASIAETWWDSSGPFKPLHVMNPTRLSFIRSTLCRHFRRDPNSSKPLEGLKVIDVGCGGGILSEPLARMGATVTAIDAVDKNIKIASIHAASDPTTASIEYCCATAEGLVKEKRLFDAVISLEVIEHVANPLEFCESLSALTIPNGATVISTINRSMRAYATAIVAAEYILRWLPRGTHEWSKLVTPEELVLMLQKASVSVEEMAGFVYNPLSGEWSLSDDISVNYIAFGVKKGEASLTNDREASLS

SEQ ID NO: 20707 - protein, 288 aa, Zea mays
  VARIANT 118: note = Ancestral polymorphism is P, Derived polymorphism is L
  VARIANT 74: note = Ancestral polymorphism is L, Derived polymorphism is V
  VARIANT 28: note = Ancestral polymorphism is V, Derived polymorphism is A
MAAEAGSRRGAAARRKAKEAAVGAAARVLFYPTLLYNVVRSKVQAEFRWWDEVDPFVLLGAVPFRSDVTRLQKLGICGVITLNEPFETLVPSSMYKASDMKCVLWENNIYSLQSWKGPEYNSRLVLSGKFNYLSLVKNNNMLEPELRTSVHNEKKSYSILPAWNGFQIVSGAIHVLSWFLNFHQVKYKNMTPAAAFEHVRSKRARVLLTHSQWKAVQEFSKKNTDRPALTSGPATASPARDAAPVTVADLNGNNAPEFLAEDASLSRRNTTPSRPTIKMLSCLFPSRV

SEQ ID NO: 20708 - protein, 542 aa, Zea mays
  VARIANT 264..542: note = Derived polymorphism lacks residues 264 to 542
MAPPPASPADSAPDPRPTASAPVPITVPSPRDHAHHHHLVDRRDTPRGRAWEPERNRRGEAMDGAAAVKLVPGEAGYVLEDVPHVSDYLPDLPTYSNPLQDNPAYSVVKQYFVNPDDTVCQKIVVHKDGPRGNHFRRAGPRQKVYFEPDEVHACIVTCGGLCPGLNTVIREIVCGLSDMYGVTKILGIQGGYRGFYARNTITLTPKSVNDIHKRGGTILGSSRGGHDTVKIVDSIQDRDINQVYVIGGDGTQRGAGVIFENLLQEVRRRGLKVSVAGIPKTIDNDIPVIDKSFGFDTAVEEAQRAINAAHVEAVSAENGIGLVKLMGRHSGFIAHYATLASRDVDCCLIPESPFYLEGEGGLFRYIEKRLKDNGHMVIVVAEGAGQKLIAETMQSIGKDASGNELLLDVGLWLSQKINEHFKKNKMTINLKYIDPTYMIRAIPSNASDNVYCTLLAHSVVHGAMAGYTGFTIGQVNGRHCYIPFYRITEKQNRVSITDRMWARLLSSTNQPSFLCNKVVEEAKKEHERATRLLDGSPSHRKG

SEQ ID NO: 20709 - protein, 346 aa, Zea mays
  VARIANT 163: note = Ancestral polymorphism is K, Derived polymorphism is Q
MAGEEAGRRGVPSLLNPPSASSEGQQEHIASDVTQLIGWTPLVELKRIAAKEGVCARIVGKVEAYQPLCSVKDRSALRMIEDAEERGLISPGTTTLVEPTSGNLGLGLVLVALRKGYRFVAVMPGQYSLDKQILLTYMGAELYVTDPSLGFPGITAKVEELKKELPNVHVLDQFSNRANPEAHVRWTGPEIWKDTAGKVDIFVAGSGSGGTVSGVGKYLKTQNPSVKVICVEPAESPVVSGGEPGSHKIQGIGPGFIPEVLDTSVIDEAVTVTTEEAMAGARRLAREEGLLVGISSGANLAACLKVAAREESKGKMIVTVFPSGGERYMTSDLFAAAREECIAMTF

SEQ ID NO: 20710 - protein, 152 aa, Zea mays
  VARIANT 30: note = Ancestral polymorphism is R, Derived polymorphism is S
MARVYVGNLDSRVTSGELEDEFRVFGVLRRRDAEDAISDLDGKNGWRVELSRNSSGRGGRDRYGGSESKCYECGETGHFARECHLRIASGGLGSGRRRSRSRSRSRSGSPRYRRSRSRSRISVDEAHAFIYMNIFLTMFFFFLFSCHANQWV

SEQ ID NO: 20711 - protein, 241 aa, Zea mays
  VARIANT 198..241: note = Derived polymorphism lacks residues 198 to 241
  VARIANT 199..241: note = Derived polymorphism lacks residues 199 to 241
MASPLQDSACAELPGSKAPATPPPTQPTERLSSWGLGSSGGAEEEEAGDPGRIPAAVFERDVSESNKDWSMMSTESMFGLQVAPSGDFTGFFLAHPEVMDSGTPPRTILAAGANTDADAKAKDAPVISPPFESIPELHEGAMKGNLVEDKMNYSKEPSQQDLQPEPAAASAEAANKAVPTPAEAEARADGRGAAADEQQPGGDSGSGSRTKGRLVLKLPLLLNADKRATCSGQHGISVNHH

SEQ ID NO: 20712 - protein, 1330 aa, Zea mays
  VARIANT 1220..1330: note = Derived polymorphism lacks residues 1220 to 1330
  VARIANT 956..1330: note = Derived polymorphism lacks residues 956 to 1330
  VARIANT 747..1330: note = Derived polymorphism lacks residues 747 to 1330
  VARIANT 48..1330: note = Derived polymorphism lacks residues 48 to 1330
MWPQAEGSHPCRLSRFGPAGTGSVSDGGGSQEASAEEAEEEVVRLSPELATHDAIDPVTLPSSTSKRRLSISVSKKLSMNIPDKLRLSRRKHKDHHHKVESEDTLWKKGIIPGEKNILDSMAGTTTVVGWVVSPILRKMLSLVQSYVSSQYNWKSNMVSDLKNLEATLMEVLLVVDEAERRHLKDRNQVALLCQMREAVCDTEDVLDKFDYKLIREKVEHQSMARSIVASSLSLGKRLVGLDKLRSELHMVIKSMARVKSCAEMFASVMAVESTNSIKPSDCVGTRVTGSFPREGTIFGRKEEVDELVSWLLHRRNINPSNDEGSFTIQLHSIHSKKNIELHSIVGIGGIGKTTVAQSIYNDQRIVNAFDKRMWVSVSHNFDKINLIKEIIAHASDDKNIKLIHFNFNMLQEELQRIISNKKFLLVLDDVWYDESYGEHINREKWWELIAPMENAVAGSKILVTTRMELVAKVLDSSRSFLHGLGQDDSWALFRHCHNSILSSSTLESIGMQIVRKLNGSPLALNVIGRHLYGRHKVAEWNEVLHSNILNSDDMLTILRPSYEGLPVHLQRCFSYCSLFPKGYHIDPEKLIYMWIAQDFIDTKGSTNKSLKDSGRSYFDELLSRSFFQMLKPGSETFYVMHDIMSDLALHVSQGECLRVECESMEPMPLYTQHLSIYSENLENLVNCDLPKLRSLIVLNKSWFCSKICLNHAILGKLKSVRVLDITGCCLEQLPDAVNRLIHLRYLESINKLVNLVHVDVEKAYVLMLSSTLKLPFVECAGEFHVNDEGSLLGLKDLNMIRGHLTLLSLDKVQNKEEASKAHLHHKEHIMKLELQWGSLNFASSTKQGVEVLDVLKPHSDLEELTISGYPGARSPSWLESGWLSRLQFICLRDCNRWEVLPPLGDLPLLKTVEIRRMQGLRTLGQKFFGRAGFPSLERLLLERLPELEWCCVDNDQVFQNLRHLSVAGCPKLREYPTYPWTLEHIAILDEERIQVKTFIPSARVSRTFCILVSSFFHVLRAHHLEFVEDMEIYVNHVVCMSREVLENLKSLQNLKIYGIHRANTCSVIAKLWDENGSAVFPSSLRSLQLVQCYLKPSYFSKQLNNLSSLETLRLINCDTIEMPCPPVNMWHLRILKQLVLYKCDWITFLEGSEALVSLEEMAISDCYDLKYVPDLNNMPSLEKLHLRRCPQVMRLSSADYQTRLKELVIESCDALSSLRELQGLVSLTKLIVANCSKLELLPGMDSFCALGILIIEDCRLLRSLPERGLPVSLRTFVLDGCHQALDEQFQKGEGPDWNKVAALPGCMRYEHMADVEDESVWHSFYNLYYF

SEQ ID NO: 20713 - protein, 459 aa, Zea mays
  VARIANT 272: note = Ancestral polymorphism is D, Derived polymorphism is H
  VARIANT 360..459: note = Derived polymorphism lacks residues 360 to 459
  VARIANT 379: note = Ancestral polymorphism is L, Derived polymorphism is Q
  VARIANT 381: note = Ancestral polymorphism is P, Derived polymorphism is L
  VARIANT 431: note = Ancestral polymorphism is P, Derived polymorphism is L
MGARQLHLEIASRTLVSASHPPPGFPSVLTVSNLDLVLGPFPIFLISIYAAPAAGLDAVLDIVRVTLPSYLSRLFPFAGRVVIDPETKIPEVACNNAGAELVVADAAVPLAAVDFSEVDQSLGLIQIPFDARLALSVQLVRFACGGYALTLGTSHLLADGRAFTLLLTALAEMVRDGGLSREPLLDRSLFKPRSPPRYSASLDAEFARFTPETMINPLLAAAIRRRMYRIDAADLAALQAAASPSAGGGRRASRFVALCAHVWKLLARAVGDASPSCRMAWIVDGRKQVEPSDGALDRYIGNVVTYTAREASVAELLRAPLPEVAGMVRAAIAGVTTAARFQELVDWMEERKAAFRDGGKWTETVNLGLGSPALIMSGLLPFAIDGDLGFGKPSLVLPWVRHGRLGSASVTVVPCPSGDGSWFFGGTRMWPRLMEVVESDPLMKPAANLGMATAAGSRL

SEQ ID NO: 20714 - protein, 143 aa, Zea mays
  VARIANT 134..143: note = Derived polymorphism lacks residues 134 to 143
  VARIANT 112: note = Ancestral polymorphism is P, Derived polymorphism is L
  VARIANT 105: note = Ancestral polymorphism is T, Derived polymorphism is I
  VARIANT 102: note = Ancestral polymorphism is E, Derived polymorphism is K
  VARIANT 94: note = Ancestral polymorphism is E, Derived polymorphism is A
  VARIANT 81: note = Ancestral polymorphism is K, Derived polymorphism is E
  VARIANT 80: note = Ancestral polymorphism is T, Derived polymorphism is A
  VARIANT 79: note = Ancestral polymorphism is G, Derived polymorphism is W
  VARIANT 75: note = Ancestral polymorphism is Q, Derived polymorphism is E
  VARIANT 60: note = Ancestral polymorphism is G, Derived polymorphism is S
  VARIANT 57: note = Ancestral polymorphism is G, Derived polymorphism is D
MALAAIYNLFIINKSGGLIYYKDYGSAGRMDTNDSLRLASLWHSMHAISQQLSPTTGCTGIDLLQAHNFDLHCFQSLTGTKFFVVCETGAPNMEMLLKAIYELYTDFVLKNPFYEMEMPIRCELFDHNLAQVIQKDRVALLGR

SEQ ID NO: 20715 - protein, 354 aa, Zea mays
  VARIANT 330: note = Ancestral polymorphism is P, Derived polymorphism is L
  VARIANT 316: note = Ancestral polymorphism is S, Derived polymorphism is L
  VARIANT 299: note = Ancestral polymorphism is S, Derived polymorphism is F
  VARIANT 227: note = Ancestral polymorphism is P, Derived polymorphism is L
MDGEEVGRRGIPTLLKPSSSSSDGSAGEQEHIASDVTQLIGWTPLVELKRIASEAGIDARIVGKMEAYQPLCSIKDRSALRMIEDAEERGLISPGVTTLVEPTSGNMGLGLVLFAIQRGYRLIAVMPAKYSLDKQILLRFMGAELYLTDPALGFPGMFDKVEQLRKQLPNVHVLNQVTNKANSEAHFRLTGPEIWKDTAGKVDVFVAGSGTGGTVSGVGKYLKMQKPGVKIICVEPAESPVISGGAPGKHKIQGVGPGFLPEVLDTSVIDETVTVSTEEAMANARRLAREEGLLVGISSGANLAACLKLPWLKVASRQENKGKMIVTVFPSGGERYINSDLFADVREECIAMTF

SEQ ID NO: 20716 - protein, 213 aa, Zea mays
  VARIANT 123: note = Ancestral polymorphism is A, Derived polymorphism is D
  VARIANT 78: note = Ancestral polymorphism is P, Derived polymorphism is A
MRRESMEAGAGRRGIPSLLKSPAARADESGGATSPQQEHIASDITQLVGWTPLVELKRIAQKDNVDARVVGKLECYQPLCSVKDRSALRMIEDAEERGLISPGATTLVEPTSGNMGIALAYIDLARGYRFVAVMPAEYSLDKQILLRYLGADLVLTDPALGFQGQLDKLEQLRKEIPNAHVLDQFANAANPEAHFRWTGSADLCTGASDLIRE

SEQ ID NO: 20717 - protein, 118 aa, Zea mays; identical to SEQ ID NO: 20680
  VARIANT 49: note = Ancestral polymorphism is A, Derived polymorphism is T
  VARIANT 61..118: note = Derived polymorphism lacks residues 61 to 118
  VARIANT 74: note = Ancestral polymorphism is D, Derived polymorphism is H
  VARIANT 86: note = Ancestral polymorphism is G, Derived polymorphism is R

SEQ ID NO: 20718 - protein, 213 aa, Zea mays
  VARIANT 129: note = Ancestral polymorphism is R, Derived polymorphism is K
  VARIANT 123: note = Ancestral polymorphism is A, Derived polymorphism is D
MRRESMEAGAGRRGIPSLLKSPAARADESGGATSPQQEHIASDITQLVGWTPLVELKRIAQKDNVDARVVGKLECYQPLCSVKDRSALRMIEDAEERGLISPGATTLVEPTSGNMGIALAYIALARGYRFVAVMPAEYSLDKQILLRYLGADLVLTDPALGFQGQLDKLEQLRKEIPNAHVLDQFANAANPEAHFRWTGSTDLCTGASDLIRE

SEQ ID NO: 20719 - protein, 118 aa, Zea mays
  VARIANT 40: note = Ancestral polymorphism is E, Derived polymorphism is K
  VARIANT 52: note = Ancestral polymorphism is H, Derived polymorphism is Y
  VARIANT 53: note = Ancestral polymorphism is T, Derived polymorphism is I
  VARIANT 55: note = Ancestral polymorphism is D, Derived polymorphism is E
  VARIANT 67: note = Ancestral polymorphism is M, Derived polymorphism is I
  VARIANT 74: note = Ancestral polymorphism is D, Derived polymorphism is H
  VARIANT 75: note = Ancestral polymorphism is I, Derived polymorphism is T
  VARIANT 88: note = Ancestral polymorphism is E, Derived polymorphism is K
MAAATLRWVLQLHRDVPRAARFYSEGLDFSVNVCTLRWAELQSGPLKLALMYTNDSNLASQRVYSSMLSFTVPDINSAVSKLMALGAELDGPIKYEIHGKVATLRCIDGHMLGLYEPA

SEQ ID NO: 20720 - protein, 80 aa, Zea mays
  VARIANT 57: note = Ancestral polymorphism is I, Derived polymorphism is M
MQRNNSFGTSWADQWDYGGDPSPRAPRDGGVGEKTKAAAATGMRKVKEGTSQGFQWIKDKCQRKNGGGNKKQQGSEVPGY

SEQ ID NO: 20721 - protein, 709 aa, Zea mays
  VARIANT 17..709: note = Derived polymorphism lacks residues 17 to 709
MAPPLEDLTRVLAELASGLAQPPAGGGTFSSTDSLPASISSLAAALNPSGDGAAASSGTGVLDAALSLMCFDPLEVNSARVNCLVRTLVSVLSASVSCCVVRPDGDAAEEMLCVGSSVSPLDCRELLRSCAALVEKLGDCGDRRHSYDLLYAVVKTILLSPHYQCLSPLPYYKEEEERVSHMGTIAAELINHSSDHILPSDHSIPPSRNMETVPLIPKLLSWHLDPLILRHDLSAMLQEVIRRPLLCLRKELYNRMEWRIIIICLVCCPTIFMEMRSLLHFWLLATGLGSVLELNNALVSSALDILLKPMSWGISIELGQRFPFSHAYFPSQQSDLLAILTGPLSYKGFLDLVSYISALVHLDNTRTRCSSQKNLQLQPSKGLVKYNSAWYMIISFPIWFSYATALLFHREGSQDYLSETLSKEITAESISDVSLVQRAAFYLSWLLCPYNHDQREMLSNNILEISHSWARNNKKCVSYQSTVNNRRKLRIPTAADSEKFHVPVNTISSLVKEFDDRCVKCCSPTAFPQAQVGNLSDLHPLYFNLLHQWIPLGVLLVSPSCVNEQNCDILLRYTSTGQVLESNGARVKTKDDATNDGFLGSCIGTAERWALTGAYLIFGWLDVVEDMAPLIFDCEDKCHSFVSQLRNKTGPYLLKCVKSLFKTLEQPNQDKDFVIDLHNRLLNWDKNVQGCEIFGDVILEMNKKFNLPL

SEQ ID NO: 20722 - protein, 134 aa, Zea mays
  VARIANT 53: note = Ancestral polymorphism is S, Derived polymorphism is P
MLVEDHLRSQAQHFCTSLTGDSITSSTSMTSLAASRSNSLNTAGKDPMAAGVPRRASLSSDAGGLPLDVYEPPPEFQSLTLTGMGLDTNGEFLMAMQQQLVHEIREVWTNSVENLLYMKEDLIIPHGCVHSLYC

SEQ ID NO: 20723 - protein, 218 aa, Zea mays
  VARIANT 54..218: note = Derived polymorphism lacks residues 54 to 218
  VARIANT 35: note = Ancestral polymorphism is R, Derived polymorphism is W
MLARVVDRRASAIRRFPPGCGRPHKPAAGPPPYHRIPTAAAAKTKHTLPNPSARAATNTAPPPPRQTLSATASLGAEAPDRGVGSGRNAAAVVTVRLVSAVRGYPPGCGRGVAVSKSKPPDSEDEAEREDGAGNPSAVVGNGDPKARACDGDVMLRASALDHAEFSSNGGVTTGGDGDAGAHDEGGGKPWEVTGLMAAPFLPWARHERRSQRGSGGRP

SEQ ID NO: 20724 - protein, 203 aa, Zea mays
  VARIANT 198..203: note = Derived polymorphism lacks residues 198 to 203
  VARIANT 165..203: note = Derived polymorphism lacks residues 165 to 203
  VARIANT 147: note = Ancestral polymorphism is P, Derived polymorphism is T
  VARIANT 137: note = Ancestral polymorphism is T, Derived polymorphism is I
  VARIANT 127: note = Ancestral polymorphism is G, Derived polymorphism is R
  VARIANT 108: note = Ancestral polymorphism is A, Derived polymorphism is S
  VARIANT 86: note = Ancestral polymorphism is P, Derived polymorphism is L
  VARIANT 84: note = Ancestral polymorphism is G, Derived polymorphism is S
  VARIANT 81: note = Ancestral polymorphism is A, Derived polymorphism is V
  VARIANT 76: note = Ancestral polymorphism is C, Derived polymorphism is Y
  VARIANT 57: note = Ancestral polymorphism is P, Derived polymorphism is S
  VARIANT 41..203: note = Derived polymorphism lacks residues 41 to 203
  VARIANT 35: note = Ancestral polymorphism is R, Derived polymorphism is I
  VARIANT 21: note = Ancestral polymorphism is T, Derived polymorphism is M
MLASEFPLLLNNRSSLPRLVTLCDQTPSMPFDVVRNVVEKQLGKNFDDMFEFFDVEPVGSASIAQVNGPVLVEDTCLCFNALKGLPGPYIKWFLEKIGHEGLNNLLKAYEDKSAFAMCIFSLALGPGEEPITFVGKTAGKIVSARGPNDFGWDPVFQPDGFEQTYAEMPKSVKNEISHRGKALALVKEHFASASYTVQSDDSA

SEQ ID NO: 20725 - protein, 78 aa, Zea mays
  VARIANT 41: note = Ancestral polymorphism is M, Derived polymorphism is L
  VARIANT 39..78: note = Derived polymorphism lacks residues 39 to 78
  VARIANT 33: note = Ancestral polymorphism is Y, Derived polymorphism is C
  VARIANT 31: note = Ancestral polymorphism is E, Derived polymorphism is K
  VARIANT 26: note = Ancestral polymorphism is L, Derived polymorphism is P
  VARIANT 24: note = Ancestral polymorphism is D, Derived polymorphism is Y
  VARIANT 22: note = Ancestral polymorphism is E, Derived polymorphism is V
  VARIANT 21: note = Ancestral polymorphism is R, Derived polymorphism is W
  VARIANT 19: note = Ancestral polymorphism is M, Derived polymorphism is L
  VARIANT 18: note = Ancestral polymorphism is Y, Derived polymorphism is C
  VARIANT 17: note = Ancestral polymorphism is E, Derived polymorphism is K
  VARIANT 15: note = Ancestral polymorphism is V, Derived polymorphism is D
  VARIANT 14: note = Ancestral polymorphism is M, Derived polymorphism is I
  VARIANT 13: note = Ancestral polymorphism is E, Derived polymorphism is D
  VARIANT 5: note = Ancestral polymorphism is V, Derived polymorphism is I
MEEQVKRKNWEKEMVLEYMKREEDLLKQVKELYRKQKQELMDYVTQPAVTHQLIHLQLLRVIRLEPSSPTSGGNILVA

SEQ ID NO: 20726 - protein, 333 aa, Zea mays
  VARIANT 250..333: note = Derived polymorphism lacks residues 250 to 333
  VARIANT 257: note = Ancestral polymorphism is S, Derived polymorphism is F
MVCRVLERRRVQAPVAGMVIDSRVVYPSYLAPEGSVASYYASRPVLPVGSDVLRNDVISQPRTHGYDGPARVTNPALAGLTGLPAGVTARGPSALEDPSLAGLSGLAPVRATGGATARGSGALEDPSLAGLSGLAPARALGPRALKEELDVVGRSSSVGRGASIPDVEHHSSIPNFDGPSENESNILFVDCLPTDCTRREVARILPAYYCPASYFFIFVSFILQALTSAGRFVSLFSWLQGHQSSAQGTQTCISSNSALIPYFGDLLSGDKAYVLCFVEFENAKFARTPMQALQGYRFDDRKPDDRCLEIHFARFPFALPGAGAGAARDHRKR

SEQ ID NO: 20727 - protein, 121 aa, Zea mays
  VARIANT 4: note = Ancestral polymorphism is R, Derived polymorphism is L
  VARIANT 7: note = Ancestral polymorphism is A, Derived polymorphism is G
MDDRQYAGLTKAGLGVLAFNSGLAIYNSWGDASSVAFVLSADSILVLLFLCLRELELQGRGAAGRGRDVGIIRAAVWTLTTLLSAMFASRVAPLMPPVVGALVWATAVATAAGGFWAVFLS

SEQ ID NO: 20728 - protein, 191 aa, Zea mays
  VARIANT 7: note = Ancestral polymorphism is D, Derived polymorphism is G
  VARIANT 39: note = Ancestral polymorphism is S, Derived polymorphism is L
  VARIANT 45: note = Ancestral polymorphism is S, Derived polymorphism is F
  VARIANT 49: note = Ancestral polymorphism is R, Derived polymorphism is W
MVLDMDGYVDPYEEVVAEDDSDNPDEDDSNAESNYKDKSFDLLKFDKHRVRNPDDTFCGPFCPLQEEQGYELGRQPANTKLSSNKTVRRVRVRGGNTKWRALRFDTCNYSWGSEALTRKTRILDVVYIATNNELVRTQTLVKSAIVQVDAAPFKQWYLTHYGVDIGRKKKVSVAKKDDTKTPQQEHVQEIL

SEQ ID NO: 20729 - protein, 370 aa, Zea mays
  VARIANT 19: note = Ancestral polymorphism is A, Derived polymorphism is T
MASTPSPLLMLAAMAVVAATLAVAPVSSADLPSGVASITSKIPNPWSAFQNLTGCHLGEQQQGLAKVKDYLSRFGYLPPESSGSFNDVFDADLEEAIKVYQRNFGLGITGVMDASTVAQMMAPRCGVADIINGTSTMGGGSASASAAHARGRNLFTYFPGSPSWPRSRKSLTYAVTQTSLTSIDRATLSQVLARAFARWSAATTLTFTETASERDADITIGFYAGDHGDGEAFDGPLGTLAHAFSPTDGRFHLDAAEAWDASGDVARAASDVAVDLESVAVHEIGHLLGLGHSAEPAAIMFPTITSRTSKVDLAQDDVAGIQNLYGGNPNFKGVAPPATSSRDMDSGATTSSRGPWTAAVAVAAGLLVAL

SEQ ID NO: 20730 - protein, 149 aa, Zea mays
  VARIANT 8: note = Ancestral polymorphism is A, Derived polymorphism is V
  VARIANT 13: note = Ancestral polymorphism is G, Derived polymorphism is S
  VARIANT 35: note = Ancestral polymorphism is R, Derived polymorphism is Q
  VARIANT 38: note = Ancestral polymorphism is L, Derived polymorphism is R
  VARIANT 40..149: note = Derived polymorphism lacks residues 40 to 149
  VARIANT 50: note = Ancestral polymorphism is T, Derived polymorphism is M
  VARIANT 85..149: note = Derived polymorphism lacks residues 85 to 149
  VARIANT 86: note = Ancestral polymorphism is A, Derived polymorphism is T
  VARIANT 127: note = Ancestral polymorphism is G, Derived polymorphism is E
  VARIANT 130: note = Ancestral polymorphism is A, Derived polymorphism is V
  VARIANT 143: note = Ancestral polymorphism is P, Derived polymorphism is L
MVHGYLVAGGFCGDPFVLSSLVNMYAKVGDVASARRLLLELPCRDVVSWTTIVSGCVLNAMLKEALGVFLMMLEDDVLPNNVTISACSHSGLISEGHKCFESMGRDHGIEPSMDHYACVVDQLGRSGRFAEAEQFIRDMHARPEIMLCA

SEQ ID NO: 20731 - protein, 152 aa, Zea mays
  VARIANT 62: note = Ancestral polymorphism is N, Derived polymorphism is S
  VARIANT 19: note = Ancestral polymorphism is S, Derived polymorphism is L
MTSTVTTTVGCGGLPVRPLSTATRGRPRRCAVRAQAAGADASNDKSVEVMRKFSEQYARRSNTFFCADKTVTAVVIKGLADHRDTLGAPLCPCRHYDDKAAEVAQGFWNCPCVPMRERKECHCMLFLTPDNDFAGKDQVISFEEIKEATSKF

SEQ ID NO: 20732 - protein, 179 aa, Zea mays
  VARIANT 28: note = Ancestral polymorphism is A, Derived polymorphism is V
  VARIANT 53: note = Ancestral polymorphism is S, Derived polymorphism is F
  VARIANT 69: note = Ancestral polymorphism is R, Derived polymorphism is Q
  VARIANT 107: note = Ancestral polymorphism is A, Derived polymorphism is V
  VARIANT 147: note = Ancestral polymorphism is A, Derived polymorphism is V
MKLLPPMEFLSSSHSESNLAPTAHIFSAILSTTSFQTPSFNTAGAFSTSSLASFRPRSLNGGGRRALGRGRGEVCHGGPGCHEHMVDAEAAAQASREEASRTYGEPAGLVNKHRAVWDRVDGGGGGSIILYVEEVGAAGGGGTSARAVALGGFVGVGVCLDEDTARCVATTQVVGNSST

SEQ ID NO: 20733 - protein, 374 aa, Zea mays
  VARIANT 38..374: note = Derived polymorphism lacks residues 38 to 374
  VARIANT 47: note = Ancestral polymorphism is E, Derived polymorphism is G
  VARIANT 64..374: note = Derived polymorphism lacks residues 64 to 374
  VARIANT 74: note = Ancestral polymorphism is V, Derived polymorphism is E
  VARIANT 89: note = Ancestral polymorphism is S, Derived polymorphism is F
  VARIANT 95..374: note = Derived polymorphism lacks residues 95 to 374
  VARIANT 114: note = Ancestral polymorphism is A, Derived polymorphism is G
  VARIANT 130: note = Ancestral polymorphism is T, Derived polymorphism is M
  VARIANT 139: note = Ancestral polymorphism is R, Derived polymorphism is C
  VARIANT 163..374: note = Derived polymorphism lacks residues 163 to 374
  VARIANT 171: note = Ancestral polymorphism is T, Derived polymorphism is M
MAAASNLVNGGVAALQIDGEAEEPQNNAAAALAPAVPWLPAVAERYERREKLGEGIFGDVYKAWDRVHDHLVAVKRLSGRTDDRFVKTSIPDFAREVMSLAACRGHPSIVQLLATHVDGNRADGDCFAVTEHAGPMNLRQYMDARRVNGDPFDEDEVRDVMRQLLAGAKHTHGAGVLHRNIVPENVIVGMDGATSKMVYKICGFGMSKPAAQTDKDDSGLLASPSPYRAPELFLGSKDYDGRVDTWSLGCIMAELVTGAGVPFFGGALDKEVFDKMMHVVGTKGIVKWQGLERVAPREKVASLQKVGHRERGYLHKMFPPKVLSSAGFKVLEGLLHSNPDRRLSAADALRMPWFRRRCSLGACFMPHGASMKSG

SEQ ID NO: 20734 - protein, 140 aa, Zea mays
  VARIANT 53: note = Ancestral polymorphism is V, Derived polymorphism is A
MMEEDQQIVAGVDAAARGGGGLGRAGAVFLTATCAAATYSAAAAGDVPSVAFVVASYGALLLLLRSLRAYELAPPEAAARREALRRRVWALCTLLSVMFAWKVASVVATPWPVAVGVWAAAAVTSAAGFVLLFRQQQRRQ

SEQ ID NO: 20735 - protein, 461 aa, Zea mays
  VARIANT 388: note = Ancestral polymorphism is P, Derived polymorphism is A
  VARIANT 365: note = Ancestral polymorphism is G, Derived polymorphism is V
MADPVVAPPGQTFERACIQACAALAFSPPTVAVDLSESHSCSSAPLVLIPNVALRNAILNWCDRLALPHPSPMSPDTAHDIVRRLMPQDRQRSSLAQRPQPQVQQQPSSRQRGDALEEEIMAALGTEGATPAEQASAMALLRQATRENREVRRQLCTPRLLAALRPMLLSADADVQVNAAAAVVNLSLEPENKVRIVRSGAVSPLVDVLRGGHTEARDHAAGAMYSLAVEDENRAAIGVLGAIPPLLDLFAGAAAHRARREAGMALYHISLSGMNRPKIARAPGAVRTLLAVAAAEARRDRASDADAAALRRLAAMILANLAGCPDGRAALMDGGAVAAVVRLMRCGSAAPGSTEEEYCISTLYGMSRGSMRFRGLARAAGVEAALQPVAEGGGGVRRDLARRTLRAMRGEDDEAPAMDSGLLGRQWDDGSVVSEGLVSIRRPPPHRSNHAGPSGSNTTQF

SEQ ID NO: 20736 - protein, 188 aa, Zea mays
  VARIANT 124..188: note = Derived polymorphism lacks residues 124 to 188
  VARIANT 129: note = Ancestral polymorphism is A, Derived polymorphism is V
MALASGTCRPLLGGPASTARLHLAVSSSSTACSIRFPRGAGGGRAAVSLRAPAPPAAAAATSGSIAPAISLTEKALKHLNKMRAERNEDLCLRIGVKQGGCSGMSYTMEFENRADASPDDSVVEYDGFAIVCDPKSLLFMFGMELDYSNALIGGGFSFQNPNATKTCGCGKSFATGKESEAAAKACNN

SEQ ID NO: 20737 - protein, 335 aa, Zea mays
  VARIANT 176: note = Ancestral polymorphism is A, Derived polymorphism is V
  VARIANT 193: note = Ancestral polymorphism is M, Derived polymorphism is I
MATTAPLLSPQRACPTHLRRRLSPLHLVFPLDASARRLRLRRAPPPCSAKFGKFDASDAPAEAEEAGGATDGGLAQPVEEDDSCLPSDLEGAIRQSGKASADFVNSGGMRAIAELLIPQLEFLNEEGAQAELWALSKIFLDTLVQETGQKVTAIFPDAGAAALLKHQWKDAQFKCASLGDRKPVGPEDEVAVMIIPDHQMLEAVERITSQLSDDPIRPLVMWNPRLVSGDVGVGFNVRNLRRNFLSTFTTVYSMRPLPTGAVFRCFPGQWKVFYDDPNRPNRYLLARELTSRPDATDIERIFGGADEQSEEAPSLMNNVMGVFSSVSRFMRVISK

SEQ ID NO: 20738 - protein, 250 aa, Zea mays
  VARIANT 40: note = Ancestral polymorphism is K, Derived polymorphism is E
  VARIANT 20..250: note = Derived polymorphism lacks residues 20 to 250
MGEVREENKRLKTMLSRIVEDYRSLQLQFHDVLQKGEPMEKKLADHRPSTITPPTGIEESEFVSLSLGTGTGTHKKEEKSVIISAAEGKWREDYLMMGVKEEEGLSLGLSSSARKDDDGAANNTGKVQPDVTTLSPEASSEDAKDDDTTEAADRQWLPSNTQKKSRNVGATEPEDDDDVGPLLPQTKKTRVSVRARCDAPTMNDGCQWRKYGQKVAKGNPCPRAYYRCTVAAGCPVRKQVRQNSTAHQFL

SEQ ID NO: 20739 - protein, 330 aa, Zea mays
  VARIANT 303..330: note = Derived polymorphism lacks residues 303 to 330
  VARIANT 286: note = Ancestral polymorphism is S, Derived polymorphism is Y
  VARIANT 251: note = Ancestral polymorphism is K, Derived polymorphism is E
  VARIANT 250: note = Ancestral polymorphism is L, Derived polymorphism is I
  VARIANT 223..330: note = Derived polymorphism lacks residues 223 to 330
  VARIANT 215..330: note = Derived polymorphism lacks residues 215 to 330
  VARIANT 209: note = Ancestral polymorphism is A, Derived polymorphism is T
  VARIANT 159: note = Ancestral polymorphism is R, Derived polymorphism is C
MNEDFLIIILRDLLPRRPDLRLVLMSATINAELFSKYFGDAPVMHIPGFTFPVAELFLEDVLEKIRYRINSERDNLAGSSRRKRFSSVKSDPLSDVFEVESTIEYICRYEAEGAILVFLTGWDEISKLLDKIKGNNFLGSPNRFLVLPLHGSMPTVNQREIFDRPPANMRKIVLATNIAESSITIDDVVYVIDCGKAKETSYDALNKLACLLPSWISKASAHQLGAVSSFLAKSLQAPDPLSVKNAIELLKTIGALDDTEELTSLGRHLCTLPLDPNIGKMLLMGSVFQCLDPVLTIAAALAYRNPFVLPIDRKEEPDAVKRSFAGDSCK

SEQ ID NO: 20740 - protein, 491 aa, Zea mays
  VARIANT 311: note = Ancestral polymorphism is Q, Derived polymorphism is R
  VARIANT 305: note = Ancestral polymorphism is Q, Derived polymorphism is H
METYGHGLVKDELHSGGGCGGGGIGGQGLYCGATATTPRAAAPAAATTGSGGGVVKSVRRRKRAPPPPSSLVVATAMSGCKDEAAGGDKSASSNSSNNASKRSSRFRGVSRHRWTGRFEAHLWDKGTWNPTQKKKGKQVYLGAYNEEDAAARAYDLAALKYWGPTTYTNFPVVDYEKELKVMQNVSKEEYLACIRRKSNGFSRGVSKYRGVARHHHNGRWEARIGRVFGNKYLYLGTYSTQEEAARAYDIAAIEYRGINAVTNFDLSTYIRWLKPPGAEDGGTTATTSSGIAAAMPPPPSSLCIQAGGLLQHPHGAAAAAAAMLHDVDDDLYRGRHALFSAGGSLDDVGSSSVYAAGTGPGPTAAALCVGGRPSPTSSSTALSLLLRSSVFQELVARNGGAPQQQQQLVPADDDGAVSLSPGVVVDAKVEQHEEAEGDLGHGGQLYGGAAGADEEDAFACSMYELDDSFARIEHSLWGCLRSSDGSDALNL

SEQ ID NO: 20741 - protein, 906 aa, Zea mays
  VARIANT 147..906: note = Derived polymorphism lacks residues 147 to 906
  VARIANT 139..906: note = Derived polymorphism lacks residues 139 to 906
MPLRLEIKRKFAQRSERVKSVDLHPTEPWILSSLYSGSVCIWDYQAQAMVKSFEVSELPVRSAKFISRKQWVVAGADDMFIRVYNYNTMDKVKVFEAHTDYIRCVAVHPTLPYVLSSSDDMLIKLWDWDKGWVCTQIFEGHSHYVMQVTFNPKDINTFASASLDRTTKIWSLGSPDPNFTLDGHQKGVNCVDYFTGGDRPYLITGSDDSTAKVWDYQTKSCVQTLEGHTHNISAVCFHPELPIIITGSEDGTVRIWHSTTYRLENTLNYGLERVWAVGYMKGSRRMVIGYDEGTIMIKMGREVPIASMDTGGKIIWAKHNEIQTVNIKTVGAGFEATDGERLPLAVKELGSCDLYPQSLKHNPNGRFVVVCGDGEYIIYTALAWRNRSFGSALEFVWSSEGEYAIRESTSRIKIFNKSFQEKKTIRPSFSAERIYGGVLLAMCSSDFICFYDWADCRLIRRIDVNVKNVYWADSGDLVAIASDTSFYILKYNRDIVASYLEGGKPVDEEGVEDAFELLHEINERVRTGIWVGDCFIYNNSSWRLNYCVGGEVTTMYHLDRPMYLLGYIANQSRVYLIDKELNVIGYTLLLSLIEYKTLVMRGDLDHANKILSSIPKAQYNSVAHFLESRGMLEEALEIATDADYKFDLAVQLGKLEVAKAIAIEAQSESKWKQLGELAMSTGKLEMAEECLLQAKDLSGLLLLYSSLGDAEGIEKLASLAKEHGKNNVAFLCLFMLGKVEDCIQLLVDSNRIPEAALLARSYLPSKVPEIVAIWRDDLSKINPKAAESLADPSEYPNLFEDWQVALTVEKSVASQRGNYLPADQYLNHAEKSDMTIVEAFKRMQVVQHEEPEDVAEENGELDQQAFEETEMQNTDDDADEPEETVLVNGNKGEEHQGTDNEGALSA

SEQ ID NO: 20742 - protein, 351 aa, Zea mays
  VARIANT 57: note = Ancestral polymorphism is P, Derived polymorphism is L
MSGSKRSLPPWMSFSKDGEDDSRKKKHAGTSQKAQKGPDFSKLLDGVVFVLSGFVNPERSTLRSQALDMGAEYRADWTSDCTLLVCAFVNTPKFRQVQADNGTIISKDWIFESHKQRKLVDIEPFLMHAGKPWRKNKEPIKTDQDEKETCKEHQKQVQRSRVKPSTSDAMEAGNLESANKCFSPSKIKQWAMDDLAQTMSWLDSQEEKPEPSELKAIASEGVITCLQDAIESLEQGNDIKGVAEQWSFVPHVVNELLKLDGGGKGAALPKEQLRQLAGKCKKIYQAEFARTDMGDKNKGRHQNDPHVTEHRRKTNTKSEDDHYDSDATIEMTEEEIDFACRRLPGLYADDT

SEQ ID NO: 20743 - protein, 391 aa, Zea mays
  VARIANT 64: note = Ancestral polymorphism is S, Derived polymorphism is Y
MEIQSSGRSIEGLMEKVLSVNILSSDYFKELFKYKTYHEVVDEIYNQVDHVEPWMTGNCRGPSSAFCLLYKLFTMKLTVKQMHGLLKHQDSPYIRAIGFLYLRYVAEPKTLWTWYEPYIKDDEEFAPGSNRKVTTMGVYVRDLLLGQYYFDSLLPRVPLPILRQVTSHLEKLKLPTKQSGMTGDSNRLESNDTARRPPSVKASLSVSFGQRAPHRASTRDSSPVRRTLPSKQDKEGDRAKSPPMKHRSRSSERDHDLERERSDRERGSGRYYKDREPDRHAREHRDRDHRRSDYSNRDGETRGRERRDRDSDRSRHASVRRSRSRSPVRGRSDGDKHRSSPFGRAPELSNLAKLKDLYGDATNVKNDAGDDRAHRDSGTEEVIRLGGARWR

SEQ ID NO: 20744 - protein, 201 aa, Zea mays
  VARIANT 54..201: note = Derived polymorphism lacks residues 54 to 201
  VARIANT 130: note = Ancestral polymorphism is K, Derived polymorphism is N
  VARIANT 144: note = Ancestral polymorphism is R, Derived polymorphism is H
  VARIANT 156..201: note = Derived polymorphism lacks residues 156 to 201
  VARIANT 185: note = Ancestral polymorphism is S, Derived polymorphism is F
MAASALHLHRRRRQGGLSRRLLKVVSYYSLTTPPYKLVDALEPYMSKRTVELHWGKHHQDYVDGLNKQLATSPLYGYTLEDLIKEAYNNGNPLPEYNNAAQVWNHHFFWESMQPEGGGLPEGGVLQQIEKDFGSFTNFREEFIRSALQLLGSGWVWLVLKRNETKLSVVHTQNAIFPLAFGDIVSNHQPRLMVGKDMDSEL

SEQ ID NO: 20745 - protein, 57 aa, Zea mays
  VARIANT 6: note = Ancestral polymorphism is P, Derived polymorphism is R
  VARIANT 4: note = Ancestral polymorphism is A, Derived polymorphism is T
MYNAPPPRPQDMSYYEHCQKRHEEKGCLYACIFTALCCFCCYETCECCLDCLCCCCD

SEQ ID NO: 20746 - protein, 408 aa, Zea mays
  VARIANT 12..408: note = Derived polymorphism lacks residues 12 to 408
MALSAEIRFGHQIPYPTTTLTPTRRRKKRKRKTRRSSRGWRAEEMDEVTVSSPLMLPATEARGGVSVVEMVMGALRRSLMLCSSSAGAGAGVREPEQEEDGVTPPGGMQIGGPTDVRHVSHVTFDRFIGFLDLPADLEPDVPRPVPSARIRGKKAKVNFRDEAAAAGAQKPAATATTPTACASAARLGPPPPKFRADEVFGNMNGGSNDLFAIMFAFSDSSSQVVRVEPGEGAAGFLPAVEVLDDEPLLPGSKRSAANMLLLSGQSSDSYGSCDLGWDWDDDTMTSDYASVFAPAAPSNVVPAWYTQGGPASKRTRSSYGYGVAMLQQGDGAQAMPGGFDPETNYQYQLLPYVVESSPSDGASTHDMDCLQMMRAGDVPQDGASSGGGGGGGGDIWSLDELLMAAGAY

SEQ ID NO: 20747 - protein, 450 aa, Zea mays
  VARIANT 106..450: note = Derived polymorphism lacks residues 106 to 450
MEGKKAKILAGAVAVLLVALELALFLCFRLSRPFYLSTAVILSAALAGTVTVLLCHALYPHGRAERMARRLVLDGGEDVPAAARVEYSYFRKVAGLPRRFSLEALSAATDGFQYVVGQGSSGTVFKGILDDGTPVAVKRIDGSAHVDKEFRSEVSAIGSVQHVSLVRLLGFCLVRNGPRFLVYEYMDNGSLDRWIFPQARHGGGAGGRCLTWLQRYQVAVDVARALAYLHHDCRAKVVHLDVKPENILLDDRLRGMLSDFGLSTLMGKEQSRVVTTVRGTTGYLAPEWLLGAGVTEKSDVYSYGMVLMEMLGGRRNLQAEPGPSGSRRWSYFPKLVADRAREGRVAEVLDRRLASSAGDEASEKPGARPTMARVVEMLEARGGASVEPPPPSDMIVVDLLALDPAQTHHGGGGGPFGLPGLPPGPSSVGTAASAAMSMGESFALSYLSGR

SEQ ID NO: 20748 - protein, 688 aa, Zea mays
  VARIANT 95: note = Ancestral polymorphism is R, Derived polymorphism is C
MAVAVAVDVPSCIQLLRSCSAVAGRQLHQLLLKSGHVPSSLPPTNSVLLMYARGSPLHSRDARRLFDEMPTKNCFSYNSIITALFKSGDHRAALRVFRSMPDRNTFSYNAVITGLTGAGDLDTASELLDEMPVKDAVACNAVLHRYVRCGRVDEAFALLKRIGSQCDSDGILPWNDPFVLTTVVGACADRTQYEIGRQAHTRLVVANTGIDSILGCALIDMYCKCGDLDSAHQVLDRLEHVDEISLSALVYGYASCGQLHKALCLFDKMESPSIALWTSLISGCNPAYHGDGAFVLFVRMLRSEMLPNSTIYAIVLNMCGFLGMLKPGQQTQACALKSGAVNDLIAASALIDFYSKCGLWADACQAFSELRHHDTIVLNSMITVYSNCGQIDEARRVFRLIPSKSVISWNSMIVGFSQNGHALDALELFCEMHRLGLQLDNVAISSVLSASGSICSVSSGEQIFGLAIALGLQSDHIVASSLIDLYCKCGNLANGRRIFSGIANPDEVLWNSMLIGYASNGYGLEALKLLDLMQSRGLKPSERTFVGVLSACCHSGLVEEGLRWFYRMKEDFGVSPSAEHYACVTDLLVRAGRLDEAVEFIENMPFKADAISWTSIIGGCKAQGNEVLLDKVANKLMETGLSTHSSLYVQLSSTLAAHGDWDKSAEIRSMMHDRRISKNAGRSWVDRA

SEQ ID NO: 20749 - protein, 116 aa, Zea mays
  VARIANT 20..116: note = Derived polymorphism lacks residues 20 to 116
MSTTVSRASLDQKLALAKRCSREATLAGAKAAAVATIASAIPTLASVRMLPWAKANINPTGQALIVSTVAGMAYFIAADKKILSLARRHSFEQAPEHLKNTSFQGTGRPHPAFFRP

SEQ ID NO: 20750 - protein, 186 aa, Zea mays
  VARIANT 15..186: note = Derived polymorphism lacks residues 15 to 186
MRQREESRSRLPCPQASALNIPDATGSCSLRMNNQRKPGDWNCKNCQHLNFSRRDYCQRCRDPRPDLQFGDGYSTVGVLTSLDIRPGDWYCSCGYHNFASRSSCFKCGTIVRDFPAGQGAAGAEGDFAGGRDSAAVRAGWKAGDWICTRPGCNVHNFASRMECYRCNAPREAGMCLVGLQPRFYIL

SEQ ID NO: 20751 - protein, 518 aa, Zea mays
  VARIANT 349: note = Ancestral polymorphism is R, Derived polymorphism is S
MAVGVVAAEGGQDRRYGGRITAFVVLSCMTAGMGGVIFGYDIGIAGGVSSMEPFLRRFFPDVYRRMRGDTRVSNYCKFDSQLLTAFTSSLYVAGLLTTFLASRVTAGRGRRASMVLGGAAFLAGAAVGGASVNVYMVILGRVLLGVGLGFANQAVPLYLSEMAPARLRGAFSNGFQLSVGVGALAANVINFGTEKIGGGWGWRVSLALAAVPAGLLTLGALFLPETPSSLVQQGRDRRDVARLLQKVRGAGVDVGDELDDIVAAGESAAGAGGGGLRRLLVERRYRPQLVMAVAIPFFQQVTGINAIAFYAPVLLRTIGMGESASLLSAVVTGVVGVASTSASMLAVDRFGRRTLFLAGGAQMLASQVLIGAIMAAELRDSGGVGKAWAGVLILLIAVYVAGFGWSWGPLGWLVPSEIFPLEVRAAGQSVTVAVSFAFTVFVAQAFLSMLCHMKAGIFFFFAVWLAVMTAFVYLLLPETKGVPIEQMAGVWRAHWFWSRVVGPESDPDIDEERARGKL

SEQ ID NO: 20752 - protein, 649 aa, Zea mays
  VARIANT 361..649: note = Derived polymorphism lacks residues 361 to 649
MLPLSKPASGFRPPSSSAPQPPHPMESSLLLSTPRPLKPFHPHHFPTARRRDASFRGKPPPPPPLPPLGRGSRRLGRAVPRASSEAFGDGFRSQDRPPGVSSGGVRRRTYREAQGEAAVPPVAAAARAVAPYVAPVGAVLMLSFVIWKVVQNMIPGKKKDHGSGKHAPSGIMWSFAAGSNLATSTLSAEKESRKNLNKFYKELRTLKTVNMAGRQFGDEGLFFLAESLAYDKSAEEVDFSGNGITAVGIEAFDGVLQINTTLKTLNLSGNDIGDEGAKCLSDILVENVGIQKLLLNSINIGDEGAKALSNMLKKNKSIRILQFSNNAIEYSGFASIAEALLENNTIRSLYLKLVTHNLVALIGNYGGPLGACSLAQGILGNKSLREIHLHGNGIGNEGIRELMSALSAHKGKITVVDIGNNNISPEGLHPVAEFLKRTKSLQWFSLYMNDISDEGAEKVAEALKDNKTISTIDLGGNNIHSKAVSAVAETLKDNAVLTTLDLSYNPIGSDGVKALCDVLKFHGKIQTLKLGWCQIGMEGAECIADCLKYNTTLSTLDLRANGLGNDGAICLARSFKIINESLTSLDLGFNEIRDDGAFALAQALKANEDLAVTSLNLANNFFTKFGQVALSEARDHVYEMTEREIDIYF

SEQ ID NO: 20753 - protein, 293 aa, Zea mays
  VARIANT 189: note = Ancestral polymorphism is K, Derived polymorphism is E
  VARIANT 186: note = Ancestral polymorphism is D, Derived polymorphism is E
  VARIANT 166: note = Ancestral polymorphism is K, Derived polymorphism is M
  VARIANT 144: note = Ancestral polymorphism is A, Derived polymorphism is S
MMPQASASLDLGLSLGLTLTSQGSLSSSTTTAGSSPWAAALSSVVADVARARGDAYAQHHAGAAMTMRASTSPDSGDTTTAKREREGELERTGSGGVRSDEEDGADGGAGGRKKLRLSKDQAAVLEECFKTHSTLNPKQKVQLANRLGLRPRQVEVWFQNRRARTKLKQTEVDCEYLKRWCDRLADENKRLEKELADLRALKAAPPSSAAAQPASAAATLTMCPSCRRVAAAASHHHQPPPPQCHPKPTVAAGGGSVVPRPSHCQFFPAAAVDRTSQGTWNTAAPPLVTRELF

SEQ ID NO: 20754 - protein, 368 aa, Zea mays
  VARIANT 81: note = Ancestral polymorphism is L, Derived polymorphism is P
  VARIANT 101: note = Ancestral polymorphism is A, Derived polymorphism is P
MTGKRLHIRTTNVHTTATLRPCSCRLHNLCKCMHAWIWIHAWPQPTAHRGGEGEAAPRGTASTLSSMLACKASPSRPCVVPLVCLLVVAAAVVVVAASAPPAEAAFDDNYVAQWGRDGYHLVVRGTEANVTMDQSSGAGFRSKSTYGSGFFHMRMKLPSGYTAGVVTTFYLISQPEDGSRDEVDLEFLGDKAGVPITLQTNVFVDGRGDREQRTRLWFDPAADFHDYKILWNPYQLVMFVDDTPVRVLRNLTGAVPGYPFPGKQTMLIRASVWDGSDWATDGGRTKVDWSRGPFTAGYRGFDVDGCANNGSDACQSPDLWWNAAEYRNITAEQRAAYEDVKRSYMNYDYCADKARFNSTTVPIECNYA

SEQ ID NO: 20755 - protein, 247 aa, Zea mays
  VARIANT 85: note = Ancestral polymorphism is V, Derived polymorphism is I
  VARIANT 113: note = Ancestral polymorphism is A, Derived polymorphism is T
MDTSGSSAAAGDAPTTGEHRMGTTIVGVCYEGGVVLGADSRTSTGMYVANRASDKITQLTDNVYVCRSGSVSVVAADTQVISDYIRYFLHQHTIQLGQPATVKVAANLIRLLAYQNKNMLQAGMIVGGWDKYEGGQIFSVPLGGTILKQPFAIGGSGSSYLYALLDHEWKEGMSQEEAEKFVVKVVSLAMARDGASGGVVRTVTINADGVKRNFYPGDKLPLWHDELEPQNSLLDILAAGNPDPMVQ

SEQ ID NO: 20756 - protein, 299 aa, Zea mays
  VARIANT 128: note = Ancestral polymorphism is A, Derived polymorphism is V
MARGGLARLLATLILFLLLATPLAAGPSLAESEADLARGTSEAAPDAQQHLLPRPLVIELPSARAGAELDADADADAVVTVDVRCASWRLAAEANNLAPWAAVPPECAPHVRDYVTGSAYRSDLDLVARESAAYARAAAPAGAADGRDAWVFDVDETLLSNLPYYAEHGYGAELFDHHKFDEWVERGEAAAIPSSLKLYNEVRGLGFKTFLLTGRSEAHRGVTVENLNKQGFHDWEKLILRAAGDREKTATVYKSEKRDEMEQEGYRILGNSGDQWSDLLGSSMSARSFKLPNPMYYIP

SEQ ID NO: 20757 - protein, 319 aa, Zea mays
  VARIANT 11: note = Ancestral polymorphism is T, Derived polymorphism is A
MEPAAMDRIATRLSAVEDLYFPSSFLGPSPAGTGAAPPPSPPRRRAELRSLLARDAPLFLERYGAALSADELAAFDALSPDYEVDWHLRRLRAAAAGAPPPASRVRNRRRAFLDRLVREGEYFSEDAMREREPYLHHEYLGRFQDPLGRAMARPGERWSETLMRRAEEAVIVEKIRGEQIRRGVDPSEWVGGGTDETMEEQEEEEEEEEEEEDGEEGMKENGTEVEKQIATEVVENDASAQVEPGNGGGSAARALNQTLSSEEMQDQLEQFTYVMQQKFLSGEDTEHMDYSRIDNDEMLDDHWSREVNYDAEEKYFEED

SEQ ID NO: 20758 - protein, 194 aa, Zea mays
  VARIANT 186: note = Ancestral polymorphism is A, Derived polymorphism is V
  VARIANT 170..194: note = Derived polymorphism lacks residues 170 to 194
  VARIANT 149: note = Ancestral polymorphism is R, Derived polymorphism is W
  VARIANT 147: note = Ancestral polymorphism is D, Derived polymorphism is N
  VARIANT 132: note = Ancestral polymorphism is R, Derived polymorphism is C
  VARIANT 104: note = Ancestral polymorphism is A, Derived polymorphism is T
  VARIANT 102: note = Ancestral polymorphism is A, Derived polymorphism is T
  VARIANT 99: note = Ancestral polymorphism is G, Derived polymorphism is R
  VARIANT 83: note = Ancestral polymorphism is A, Derived polymorphism is V
  VARIANT 73: note = Ancestral polymorphism is R, Derived polymorphism is K
  VARIANT 60: note = Ancestral polymorphism is D, Derived polymorphism is N
  VARIANT 49: note = Ancestral polymorphism is E, Derived polymorphism is D
  VARIANT 41: note = Ancestral polymorphism is A, Derived polymorphism is T
  VARIANT 37: note = Ancestral polymorphism is S, Derived polymorphism is F
  VARIANT 33: note = Ancestral polymorphism is G, Derived polymorphism is D
  VARIANT 31..194: note = Derived polymorphism lacks residues 31 to 194
  VARIANT 29: note = Ancestral polymorphism is K, Derived polymorphism is N
MGVDGRNWVRPRHGHEFLVDDVLRLAAGKIQTGLDVSGGAANFTAWMRERRVTIFTTVLNNAGKPMNEFVAARGLFPLLLSLVHRFLFYDGVFDLVHVRATALAEGGSPALGQAGTEEALEFFMFDVNRVLRAGGLLWIDSHMCHADERRKALARLIGRYGYKKLQWATGEKADTGSTKAAMYLSAVLQKPTRG

SEQ ID NO: 20759 - protein, 268 aa, Zea mays
  VARIANT 243: note = Ancestral polymorphism is D, Derived polymorphism is G
  VARIANT 202: note = Ancestral polymorphism is G, Derived polymorphism is A
  VARIANT 188..268: note = Derived polymorphism lacks residues 188 to 268
  VARIANT 180: note = Ancestral polymorphism is P, Derived polymorphism is L
  VARIANT 155: note = Ancestral polymorphism is H, Derived polymorphism is Y
  VARIANT 142: note = Ancestral polymorphism is R, Derived polymorphism is C
  VARIANT 130: note = Ancestral polymorphism is P, Derived polymorphism is L
  VARIANT 105: note = Ancestral polymorphism is E, Derived polymorphism is K
  VARIANT 103: note = Ancestral polymorphism is P, Derived polymorphism is S
  VARIANT 84: note = Ancestral polymorphism is A, Derived polymorphism is V
  VARIANT 42: note = Ancestral polymorphism is A, Derived polymorphism is V
  VARIANT 39: note = Ancestral polymorphism is N, Derived polymorphism is I
  VARIANT 21: note = Ancestral polymorphism is H, Derived polymorphism is Q
MGSVSLNVASSRRGGRRLACQCSPALLNLLVLLSLLSTNLIALLAFLSPHAHPVSVPAATSNLPSSAAADISAQVAAIARELDVTRLVPHRASAGDGTGTTLPPELLLFLSPHALGAHPHAGLHRARLLPLPLHARAPRRVRHLRTPRRLPTRRHARAPPLLDNTGKPMNEFVAARGLFPLLLSLAHRFPFYDGVFDLVHVGATALAEDGSPALGQAGTEEALEFFMFDVDRVLLVGGLLWIDSHMCHADERRQALARLIGRYGYKKL

SEQ ID NO: 20760 - protein, 194 aa, Zea mays
  VARIANT 71: note = Ancestral polymorphism is A, Derived polymorphism is V
  VARIANT 24: note = Ancestral polymorphism is R, Derived polymorphism is C
MGVDGRRWVRPRHGHEFLVDDVLRLAAGKIRTGLDVSGGAANFVARMRERGVTIFTTVLDNTGKPMNEFVAARGLLPLLLSPAHRFPFYDGVFDLVHVRATALAEGGSPALGQAGTEEALEFFMFDVDRVLRAGGLHWIDSHMCHADERRQTLAKLIGRYGYKKLQWATGEKVGTGSTKAAMYLCAVLQKPARV

SEQ ID NO: 20761 - protein, 258 aa, Zea mays
  VARIANT 216: note = Ancestral polymorphism is A, Derived polymorphism is T
  VARIANT 197: note = Ancestral polymorphism is A, Derived polymorphism is T
  VARIANT 146: note = Ancestral polymorphism is P, Derived polymorphism is L
  VARIANT 90: note = Ancestral polymorphism is A, Derived polymorphism is T
  VARIANT 84: note = Ancestral polymorphism is D, Derived polymorphism is G
MPPLSRTPASAPPDPLHARAPRRVSHLRAPRRLPAHRLVSKACEPLPRRRCLSRGPRAAFPASNMGVDGRRWVRPRHGHEFLVDDVLRLAASKIRTGLDVSGGAANFAARMRERGVTIFTTVLDNAGKPMNEFVAARGLFPLLLSPAHRFPFYDGVFDLVHVRATALAEGGSPALGQAGTEEALEFFMFDVDRVLRAGGLLWIDSHMCHADERRQTLARLIGRYGYKKLRWATGEKAGTGSTKAAMYLCAVLQKPARV

SEQ ID NO: 20762 - protein, 289 aa, Zea mays
  VARIANT 21: note = Ancestral polymorphism is S, Derived polymorphism is R
  VARIANT 116: note = Ancestral polymorphism is L, Derived polymorphism is Q
  VARIANT 253: note = Ancestral polymorphism is G, Derived polymorphism is R
MASEVRAWLLLLLLLLTGGASLGPPAAAGAAPALFDVNYVKDWGRLVDHGTEVNLILDQSSAARGGGFKSKSTYGSGFFHLRMKLPSGYTAGVVTTFYLISQPEDGTRDEVDFEFLGDKDGVPVTLQTNFFVNGKGGREQRLHLWFDPAAGFHDYKILWNPYQLVMFVDETPIRVVRNLRGSVPGYEFPTKPMLIRGSIWDGSTWATDGGRTKVDWSRAPFTAGYQGFDVSGCATASATPRCGSPGLWWNGVGYRNITAAQRAAYEGVVKKYMTYDYCKSSRKIECAYI

SEQ ID NO: 20763 - protein, 337 aa, Zea mays
  VARIANT 261: note = Ancestral polymorphism is P, Derived polymorphism is L
  VARIANT 39: note = Ancestral polymorphism is A, Derived polymorphism is V
  VARIANT 34..337: note = Derived polymorphism lacks residues 34 to 337
  VARIANT 1: note = Ancestral polymorphism is L, Derived polymorphism is M
MLAFLSPRAHRIPVPVPPATSNLSSSATAAISAQVAAMAREVDATRLVPHRASVGDGTGTTLPPELILFLSPHALPLGRDARTGLTPMPATVTHACFRSWADLQVRRCFGSPSTLALLDAFATYAPHAACPRDATLAHRLVSKACEPLPRCRCLSWGPRVMLPASNMGVDGRRWVRPRHGHEFLVDDVLCLAAGKIQTGLDVSGGAANFAAQMREREDMPWPTRTTHCLRLCIFTTVLDNVRKPMNEFMAARGLFPLLLSPAHRFPFYDGVFDLVHVGATALAEGGSPTLGQAGTEEALEFFMFDVDRVLRAGGLLWIDSHMCHADERRQALARLIG

SEQ ID NO: 20764 - protein, 125 aa, Zea mays
  VARIANT 87: note = Ancestral polymorphism is R, Derived polymorphism is P
MAIVNKKQGGAAASGLKHILKRCSSLGRRQQQHQRSVGEDEKEEEEATGLPSDVPRGHFAVYVGERRRRFVVPIALLDRPEFRTLLRRAEEEFGFAGAGGAGGALVLPCEEVAFRSLTSALACAR

SEQ ID NO: 20765 - protein, 324 aa, Zea mays
  VARIANT 84: note = Ancestral polymorphism is C, Derived polymorphism is R
MAAPASSSCFHPRATASPPSSLSVGTKVFVGLRAQTKLGSSESSCPNVSAGFHTAVNRRISLSLMGFGTYMDAIVSSRFEEITRYVSSDSSGYSRLSKKKATRARISMMPIGTPRVPYRTPGEGTWQWLDIWNALYRERIIFIGDNIDEEFSNQVLASMLYLDSIDNSKKIMLYINGPGGDLTPCMALYDTMLSLKSPIGTHCLGFAFNLAGFILAAGEKGSRTGMPLCRISLQSPAGAARGQADDIENEANELIRIKNYLYGKLAGHTGHSVEKIHEDLSRVKRFDAEGALEYGIIDRIVRPSRIKKEGSTAQRRDMRNLGLG

SEQ ID NO: 20766 - protein, 446 aa, Zea mays
  VARIANT 233..446: note = Derived polymorphism lacks residues 233 to 446
MAVTITWVKARQIFDSRGNPTVEVDVGLSDGSYARGAVPSGASTGIYEALELRDGGSDYLGKGVLKAVSNVNNIIGPAIVGKDPTEQVEIDNFMVQQLDGTSNEWGWCKQKLGANAILAVSLAVCKAGAMVKKIPLYQHIANLAGNKTLVLPVPAFNVINGGSHAGNKLAMQEFMILPTGASSFKEAMKMGVEVYHNLKSIIKKKYGQDATNVGDEGGFAPNIQENKEGLELLKAAIEKAGYTGKVVIGMDVAASEFFGEKDKTYDLNFKEENNDGSKKISGDSLKDLYKSFVSEYPIESIEDPFDQDDWSTYAKLTDEIGQKVQIVGDDLLVTNPTRVAKAINEKTCNALLLKVNQIGSVTESIEAVRMSKRAGWGVMASHRSGETEDTFIADLSVGLSTGQIKTGAPCRSERLAKYNQLLRIEEELGDAAVYAGAKFRAPVEPY

SEQ ID NO: 20767 - protein, 151 aa, Zea mays
  VARIANT 104: note = Ancestral polymorphism is A, Derived polymorphism is V
  VARIANT 99: note = Ancestral polymorphism is R, Derived polymorphism is H
  VARIANT 27: note = Ancestral polymorphism is H, Derived polymorphism is Y
MPIGSGCTTQALAAMHGGGEPEVVEPHRRLLQQRMEPLSSFRPPADSDVDRDDCRRLTRLLVNVTVDRSLWPVHLVLGADATVADLVRAAVAAYAREGRRPPLAGAAADGFELHLDKYSLQSLRLEDKVLDLGSRNFFLCARRPAGLGLTT

SEQ ID NO: 20768 - protein, 246 aa, Zea mays
  VARIANT 233: note = Ancestral polymorphism is A, Derived polymorphism is T
  VARIANT 213: note = Ancestral polymorphism is L, Derived polymorphism is P
  VARIANT 208: note = Ancestral polymorphism is P, Derived polymorphism is A
  VARIANT 172: note = Ancestral polymorphism is A, Derived polymorphism is T
  VARIANT 108: note = Ancestral polymorphism is P, Derived polymorphism is Q
  VARIANT 76: note = Ancestral polymorphism is T, Derived polymorphism is M
MITTASAAAVANSGGVDLTPAVRRNKKRKLPEKQLPDRVDALLPESALYTQLLEFEARVDTALARKKVDIQEALKTPPSLQRTLRIYVFNTFANQGPRTIPPPKNADPPTWSLKIIGRVLEDGAELDPSSVVPKHNPVYPKFSQFFKRVTIALDPSLYPENPLIIWENARTAAQQEGFEVKRKGDKEFVANIRLEMNYNPEKFKLSQPLMEVLGVEVDTRARVIAALWQYIKAKKLQNPNDPSFFI

SEQ ID NO: 20769 - protein, 255 aa, Zea mays
  VARIANT 114: note = Ancestral polymorphism is D, Derived polymorphism is V
MASSPQTVIQMSSPRANAATAPQTTPNKVVGADADNRVPAMAATAGSGGTMADKVMTSAANLAQLLPTGTVLAYQALSPSFTRHGVDCTASNQWLTAALVGVLAGLSLLLSFTDSVVGTDGRLYYGVATPRGFNVFNLSGQEEGLQWAPGQLRRLRLRPLDYVHAIFAAVVFLTVAFSDVGLQRCFFPHAGANTSELLKNLPLGTAFLSSFVFLIFPTTRKGIGYSDTTPHQKASDDDDATTPVLLPTKSHQHTV

SEQ ID NO: 20770 - protein, 555 aa, Zea mays
  VARIANT 37: note = Ancestral polymorphism is V, Derived polymorphism is M
  VARIANT 255: note = Ancestral polymorphism is P, Derived polymorphism is L
MAPKRKPAAAAKSDPDGIFRGVSAFIVPNGVQARRLVVWKQRLVQMGGRVVEKPTKGELAGVNHVLAMDAKALLRELDAAWLHRFRGSVVSFEWIEECLKSGERLPIHNFAINYEKEFKPKNAVCTGNLVASRPSKRTKMSSEYPGDHQIISGGDREKELAAGGPPGASAHVVEGSSAGKQPNQYASSQSSSADSKDTIGSHGTFGIEEASSGGPSIYAPADLNKNITKIFGRLIDIYRALGDDRRSFSYYKAIPVIEKLPFKIESADQVKGLPTIGKSLKDHINEIVTTGKLSKLEHFENDEKVRTISLFGEVWGVGPATALKLYEKGHRTLDDLQRDESLTNAQRIGLKFFDDIKQRIPRHDVSEMEKLLQDVGTDILPGVTIVCGGSYRRGKASCGDMDIIITHPDGESHVGFLSKFVQRLKEINFLREDLIFSIHSVDGTDSGVDTYFGLCTYPGRELRHRIDLKVYPRNRYACGLLAWTGNDVLNRRSCRFRLLAESKGYVLDDTGLYLATRGSGGKHAGRSDAIVNCHTEKDVFETLGFPWLEPHERNL

SEQ ID NO: 20771 - protein, 211 aa, Zea mays
  VARIANT 27: note = Ancestral polymorphism is A, Derived polymorphism is G
MLARTIGGAVRTRLAPSLASLLCRGYASPASSADDLVIDEDPPRAASTSVAATTVAATVPTLLQPRVLIYDGVCHLCHRGVKWVIRTDKHAKIKFCCVQSKAAEPYLRLVGMDREDVLRRVLFVEGPEAYYEGSTAALKVASYLPPPYSVLSSLLIVPTPLRDAVYDYIAKNRYDWFGKDDECIVTKDKEILERFIDREEMLGGGPSNSFF

SEQ ID NO: 20772 - protein, 416 aa, Zea mays
  VARIANT 205..416: note = Derived polymorphism lacks residues 205 to 416
  VARIANT 271: note = Ancestral polymorphism is P, Derived polymorphism is L
MISDPVGRTRRVTYFANFLVTRPNCSLQPKPYLRAEPPRLIPFPVSAPHTHRAARRLRLMRAVAAAASPPLRALLLLSRHPRRAGFTNWPSLPRGQNAGPTAPPAATAPKPAAPSRRQGRGLTASLPRQVARISTPHLRPPATPPRCPDRRHQSHGVRALAGCPRKTVRHLPAPTSHLRFTMNPSSSSSSSGGYHSRAAAFASPQPRGGGGRRRGGGRGQDGSDRIDALGRLLTRVLRHMAAELRLDMRTDGYVRVRDLLKLNLQTFAKVPLKSHTVDEIREAVRRDNKQRFSLLEEDGELLIRANQGHTVTTVTSESLLKPILSPDEVSVCVHGTYRKNLDSILQSGLKRMARLHVHFSSGLPSDGEVISGMLSFFRDTSVFRLCLIALEIIVRGKISWRHPNTLANSSAISYFL

SEQ ID NO: 20773 - protein, 165 aa, Zea mays
  VARIANT 42: note = Ancestral polymorphism is E, Derived polymorphism is D
  VARIANT 117..165: note = Ancestral polymorphism lacks residues 117 to 165
MAADMAYAPPMKAGKAGFEAGMMDPQHRIRITLSSKSVKNLEKVCGDLVKGAKGKELKVKGPVRMPTKVLHITTRKSPCGEGDLSLPPPQLLTSNRKVNIWVMSFSDYGFVIFWTCWAGTNTWDRFEMRIHKRVIDLVSTPDVVKQITSITIEPGVEVEVTISDA

SEQ ID NO: 20774 - protein, 174 aa, Zea mays
  VARIANT 72: note = Ancestral polymorphism is A, Derived polymorphism is G
MGNCQAAEAAAAVVQHPGGRVQRLYWATSAAEVMRANPGHYVALVTHRAGAGDEGKRSQQRQREQEQQRHGGARVTRVKLLKPRDTLVLGQAYRLITVAEVAKALQAKKEEKTRKAQQQQLLLLQVAEPKHGGGSTGSGDESQPQEQVADGCLDQVLLRDCRPIPKQCPSPTNN

SEQ ID NO: 20775 - protein, 736 aa, Zea mays
  VARIANT 182..736: note = Derived polymorphism lacks residues 182 to 736
MATHSVAAAHATIAARAGAAGAPAPAERLGFRRLGSPAGGLRSARRAPPAAASRRHRVVRAAAVETLQGKAATGELLEKSVNTIRFLAIDAVEKANSGHPGLPMGCAPMGHVLYDEVMRYNPKNPYWFNRDRFVLSAGHGCMLQYALLHLAGYDSVKEEDLKQFRQWGSRTPGHPENFETPGVEVTTGPLGQGIANAVGLALAEKHLAARFNKPDSEIVDHYTYVILGDGCQMEGIANEACSLAGHWGLGKLIAFYDDNHISIDGDTEIAFTEDVSTRFEALGWHTIWVKNGNTGYDDIRAAIKEAKAVTDKPTLIKVTTTIGFGSPNKANSYSVHGSALGAKEVEATRQNLGWPYDTFFVPEDVKSHWSRHTPEGAALEADWNAKFAEYEKKYADDAATLKSIITGELPTGWVDALPKYTPESPGDATRNLSQQCLNALANVVPGLIGGSADLASSNMTLLKMFGDFQKDTAEERNVRFGVREHGMGAICNGIALHSPGFVPYCATFFVFTDYMRGAMRISALSEAGVIYVMTHDSIGLGEDGPTHQPIEHLVSFRAMPNILMLRPADGNETAGAYKVAVLNRKRPSILALSRQKLPHLPGTSIEGVEKGGYTISDNSTGNKPDIIVMGTGSELEIAAKAADELRKEGKTVRVVSFVSWELFDEQSDEYKESVLPAAVTARISIEAGSTLGWQKYVGAQGKAIGIDKFGASAPAGTIYKEYGITVESIIAAAKSF

SEQ ID NO: 20776 - protein, 168 aa, Zea mays
  VARIANT 48..168: note = Derived polymorphism lacks residues 48 to 168
  VARIANT 62: note = Ancestral polymorphism is Y, Derived polymorphism is N
  VARIANT 108..168: note = Derived polymorphism lacks residues 108 to 168
MRLSFSSLAPLFLYFIQWLDCGCCYALLSYLGLFHILICKVYADGDSSVSTYERRASLREFYAIVYLILQQLESSLIERDLKGKGRCKDIVSRRRMEDWKKEIDQPALIPHIAEAKSHKYSYEVLFRSLQKLLIDTATSEYLFTDDFFGEESIFHDIFAGLLEAQYFL

SEQ ID NO: 20777 - protein, 390 aa, Zea mays
  VARIANT 108: note = Ancestral polymorphism is P, Derived polymorphism is R
  VARIANT 144..390: note = Derived polymorphism lacks residues 144 to 390
  VARIANT 170: note = Ancestral polymorphism is A, Derived polymorphism is T
  VARIANT 181: note = Ancestral polymorphism is G, Derived polymorphism is R
  VARIANT 192: note = Ancestral polymorphism is S, Derived polymorphism is Y
  VARIANT 223..390: note = Derived polymorphism lacks residues 223 to 390
  VARIANT 253: note = Ancestral polymorphism is M, Derived polymorphism is K
  VARIANT 265: note = Ancestral polymorphism is G, Derived polymorphism is R
  VARIANT 270: note = Ancestral polymorphism is P, Derived polymorphism is L
  VARIANT 275: note = Ancestral polymorphism is S, Derived polymorphism is R
  VARIANT 290: note = Ancestral polymorphism is G, Derived polymorphism is S
  VARIANT 308: note = Ancestral polymorphism is P, Derived polymorphism is L
MERRYMGWGPRTYCNVLGDGGELGTGATGTKALAATEDVDLVRLSLPRTGVEVNQTLPKERSKSNKYWEKVNPDNLVFGGWDISNMNLVDAMTRAKVLDIDLQKQLRPYMESMVPLLGVYDPDFIAANQGSRANNVIKGTKKEQVEQIIKDIREFKEKNKVDKVVVLWTANTERYNNVCAGLNDTMENLLASMDKNEAEISPSTLYVIACVTEGVSFINGSPQNTFVPGLIDLAIKNNCLIGGDDFKSGKTKMKSVLVDFLVGAGIKYVLYVGDSKRAMDEYTSEIFMGSKNTIVLHNTYEDSLLTTPIILDLVLLAELSTRIQLKPEGTDKFHSFHPVATILSYLTKAPLVPPGTLVVNALAKQRAVLENIMRACVGLALENNMILEYK

SEQ ID NO: 20778 - protein, 191 aa, Zea mays
  VARIANT 159: note = Ancestral polymorphism is P, Derived polymorphism is Q
  VARIANT 119..191: note = Derived polymorphism lacks residues 119 to 191
  VARIANT 27: note = Ancestral polymorphism is C, Derived polymorphism is R
MLWKIHDWPSLSMDENSQMIAKIVVVCNDAIIGHSEHQYVATGMPTKAALKQFIQQKKNMICPYVSGQCFHQRGRRGRSKGLGFCRCWTARCQTCQPLSLSSATLFHDRFARTEPIRRQLSNVRYNAVEEMVMEEASPGTVEELLLVSAIRGKKVERAPIWLMRQAERYMNASPLPFCDSLLCWSAKHFCN

SEQ ID NO: 20779 - protein, 97 aa, Zea mays
  VARIANT 4: note = Ancestral polymorphism is V, Derived polymorphism is M
  VARIANT 25: note = Ancestral polymorphism is G, Derived polymorphism is D
  VARIANT 62: note = Ancestral polymorphism is S, Derived polymorphism is Y
MDKVLAFSILSASPADLSSTGAGFGGSWARLSWRRGADDQRAPRREQQQEEDEDREKRDLRSRDGGAHASGGGAAAAPPRFAPEFDGIDWFGTIVSR

SEQ ID NO: 20780 - protein, 87 aa, Zea mays
  VARIANT 33..87: note = Derived polymorphism lacks residues 33 to 87
MDKILAFSILSSSPADISAAGLSSSSSAARLSWRARPQAAAADAAPTPRQEKAADQRAPAAERRRETRPRFAPEFDGLHCFESIVSA

SEQ ID NO: 20781 - protein, 462 aa, Zea mays
  VARIANT 51: note = Ancestral polymorphism is P, Derived polymorphism is L
  VARIANT 25: note = Ancestral polymorphism is A, Derived polymorphism is V
MAASSSPRAAGLRGPSLTVLLFLVAAMVSVPPAAAEIRETAIRADPRSIIPLDEFGFSHSGVLELNVSGIAFDPQASAELDLSQLGFFLSTLDAWVHVLRQLQDLDVTCALQSELVKLAFSFDRLRPPSNPAGVEVARSSSFSTAFRVSEPGQYTLVFANCLGGGLKVDMDVRSAMYNVDPATGERQYLSAGASALPSFYFLFCLAYAGLAAAWVSILLRKRAAVFRIHYFMLAVLVLKALNLLAEAEDKSCIERTGTAHGWDVLFYIFSFLKGISLFTLIVLIGTGWSFLKPYLADREKKVLMAVIPLQVVANIAQVVIDESGPYARDWVTWKQIFLLVDVICCCAVLFPIVWSIKNLREAARSDGKAAVNLMKLTLFRQYYVVVICYIYFTRVVVYALQTITSYRYLWTSVVAGELATLAFYVFTGYKFRPEVHNPYFAIDDEEEEAAAEALKLDDEFEL

SEQ ID NO: 20782 - protein, 385 aa, Zea mays
  VARIANT 214..385: note = Derived polymorphism lacks residues 214 to 385
  VARIANT 34: note = Ancestral polymorphism is A, Derived polymorphism is V
MAASSSPRAAGLRGPSLTVLLFLVAAMVSVPPAAAEIRETAIRADPRSIIPLDEFGFSHSGVLELNVSGIAFDPQASAELDLSQLGFFLSTLDAWVHVLRQLQDLDVTCALQSELVKLAFSFDRLRPPSNPAGVEVARSSSFSTAFRVSEPGQYTLVFANCLGGGLKVDMDVRSAMYNVDPATGERQYLSAGASALPSFYFLFCLAYAGLAAAWVSILLRKRAAVFRIHYFMLAVLVLKALNLLAEAEDKSCIERTGTTHGWDVLFYIFSFLKGISLFTLIVLIGTGWSFLKPYLADREKKVLMAVIPLQVVANIAQVVIDESGPYARDWVTWKQIFLLVDVICCCAVLFPIVWSIKNLREAARSDGKAAVNLMKLTLFRQYYAL

SEQ ID NO: 20783 - protein, 657 aa, Zea mays
  VARIANT 551..657: note = Derived polymorphism lacks residues 551 to 657
  VARIANT 547..657: note = Derived polymorphism lacks residues 547 to 657
  VARIANT 501..657: note = Derived polymorphism lacks residues 501 to 657
  VARIANT 467..657: note = Derived polymorphism lacks residues 467 to 657
  VARIANT 428..657: note = Derived polymorphism lacks residues 428 to 657
  VARIANT 372..657: note = Derived polymorphism lacks residues 372 to 657
  VARIANT 329..657: note = Derived polymorphism lacks residues 329 to 657
  VARIANT 306..657: note = Derived polymorphism lacks residues 306 to 657
  VARIANT 282..657: note = Derived polymorphism lacks residues 282 to 657
  VARIANT 224: note = Ancestral polymorphism is M, Derived polymorphism is I
  VARIANT 220: note = Ancestral polymorphism is I, Derived polymorphism is T
  VARIANT 214: note = Ancestral polymorphism is G, Derived polymorphism is D
  VARIANT 213: note = Ancestral polymorphism is T, Derived polymorphism is I
  VARIANT 212: note = Ancestral polymorphism is W, Derived polymorphism is C
  VARIANT 204..657: note = Derived polymorphism lacks residues 204 to 657
  VARIANT 117..657: note = Derived polymorphism lacks residues 117 to 657
  VARIANT 71..657: note = Derived polymorphism lacks residues 71 to 657
  VARIANT 45..657: note = Derived polymorphism lacks residues 45 to 657
  VARIANT 43..657: note = Derived polymorphism lacks residues 43 to 657
  VARIANT 23..657: note = Derived polymorphism lacks residues 23 to 657
MSQKVTDGRIRRARGKKLRLFVEKEVSATRHGYQSARIPLDEEAQIDMAMRNSLRDSFSTLEHDSCSPFDKSAGSASGAASCSTGKQSRLSRYYKNTQDTSRGPFDIDLARSRTQVQPRIDVMLERGHKEKLGITLAKWFHANDIPGRKADCPYFRSALKLAQQLGDGVPIPGGREIDGPLLDMNYANMEAHMAKFKEDWKDYGVTVMCDSWTGPTMMSIINFMIFYNGCMFFHKLHAMMREKIGGELVRWNATRFGTVFIFLQSFFDRKDKFKLWMASADWENCKWAGEEDHDFTYDCLTKNKWWTDMEKVLKVVSPIYSVLRLADQQKSVSISSFLPKMMSDMVKIRANLGDDPINRNMCDRLMQVINRRLDYMLNGTLMLAAAALNPEALYTSKMARKPKFQHAVTMAIKKLSSSSSKASAAIDQYTFFRKQAGLFGGEEAKDSTLNGCTSAVYVHYNLKLRIQHYETDMESLEQMKNSKDRNIDPCSIMIDVAMYDEGNPIMEWLCSSRSESLPTLDENDEPESPNRPSGFVLEELGGLNEEEMVLLNSRIGSRRKNVRKRKVAEEDIGDDFLSDSSEGAGSPTYDESGDSESNDGGGDDEDGDPSGPSSAARPPTHNGPGQDEQPAALRPSSKRQKKLSIKGLYMLEKVKYI

SEQ ID NO: 20784 - protein, 191 aa, Zea mays
  VARIANT 22..191: note = Derived polymorphism lacks residues 22 to 191
  VARIANT 30..191: note = Derived polymorphism lacks residues 30 to 191
  VARIANT 100..191: note = Derived polymorphism lacks residues 100 to 191
MAVAVGDAAHEPGRHQVRGVLRPGAPHGGELPGPLRQRLLRRHRVPPKHQGLHDPGRRPHRLRQGRLLHLGHQVRGRVQGVPQAQRTGDHVDGQQRAQHQRQPVLHHLRQAAAPQRPLHRLRQGHPRLRGPRPHGEGADRPRGQAARRDQAQPRHHPRQPASPLNYYCLPPAPAVLSRGLINYYYYSWKSG

SEQ ID NO: 20785 - protein, 552 aa, Zea mays
  VARIANT 458: note = Ancestral polymorphism is A, Derived polymorphism is S
  VARIANT 221: note = Ancestral polymorphism is Q, Derived polymorphism is L
MRDGGDGDDDGHATSRATRTKRKPSRDPRPRPRADGGMRIVVPLQGVVQGRGGLVLGSLIPCALFYFFQLYIKRNRPAPAPAPAPAPGSPPPAAASPILRSHSRGLLTPRAALPSLSARGAVVRAGDEDSLYYAGLRRCAADPYHPASNPDGVVNLGLAENHLSLDLVGRWMEEHAGAAMLDGLAAAGDEVRDLTIRGLATYQPYDGILALKMALAGFMRQTMHGSVSFDPSQMVITCGATPAMEILSFCIADPGNAFLVPSPYYPGWDRDIKWRTGVELIPVPCRSTDNFNVSVTALEIAYKQAKKRGIRVRGVLISNPSNPTGGIVPKEILHDLLQFAAEKNIHLISDEIFAGSTYGSDKFVSVADVVDELEDFDKGRVHIIYGLSKDLSLAGFRVGVIYSYNEHIVSAAAKIARFSSVSSPTQRLLVSMLSDQKFISEYIKVNRERLRKMYLLFSDALKQLGIECFKSSGGFYCWADMSRYIRSYSEKGERKLWDRLLEEAKVNVTPGSSCHCIEPGWFRCCFTTLSEEDIPVLVERLRRVTDSFKSKR

SEQ ID NO: 20786 - protein, 985 aa, Zea mays
  VARIANT 262..985: note = Derived polymorphism lacks residues 262 to 985
MAARSSAAAVAVLLLAAAGAAAAAGGAEGDGDGQALMAVKAGFRNAANALADWDGGRDHCAWRGVACDAASFAVVGLNLSNLNLGGEISPAIGQLKSLQFVDLKLNKLTGQIPDEIGDCVSLKYLDLSGNLLYGDIPFSISKLKQLEDLILKNNQLTGPIPSTLSQIPNLKTLDLAQNKLTGDIPRLIYWNEVLQYLGLRGNSLTGTLSPDMCQLTGLWYFDIRGNNLTGTIPEGIGNCTSFEILDISYNQISGEIPYNIGYLQVATLSLQGNRLIGKIPEVIGLMQALAVLDLSENELVGPIPPILGNLSYTGKLYLHGNKLTGHIPPELGNMSKLSYLQLNDNELVGTIPAELGKLTELFELNLANNNLEGHIPANISSCSALNKFNVYGNRLNGSIPAGFQKLESLTYLNLSSNSFKGQIPSELGHIVNLDTLDLSYNEFSGPVPPTIGDLEHLLELNLSKNHLTGSVPAEFGNLRSVQVIDMSSNNLSGYLPEELGQLQNLDSLILNNNSLAGEIPAQLANCFSLVSLNLSYNNFSGHVPSSKNFSKFPMESFMGNLMLHVYCQDSSCGHSHGTKVSISRTAVACMILGFVILLCIVLLAIYKTNQPQLPEKASDKPVQGPPKLVVLQMDMAVHTYEDIMRLTENLSEKYIIGYGASSTVYRCDLKSGKAIAVKRLYSQYNHSLREFETELETIGSIRHRNLVSLHGFSLSPHGNLLFYDYMENGSLWDLLHGPSKKVKLDWDTRLRIAVGAAQGLAYLHHDCNPRIVHRDVKSSNILLDGSFEAHLSDFGIAKCVPAAKSHASTYVLGTIGYIDPEYARTSRLNEKSDVYSFGVVLLELLTGRKAVDNESNLHQLILSKADDDTVMEAVDPEVSVTCTDMNLVRKAFQLALLCTKRHPADRPTMHEVARVLLSLLPPAAKPPASKAAAASAAAGDYTRFLATAADLRRGGVADDDTGDNSSSDEQWFVRFGEVISKHTLS

SEQ ID NO: 20787 - protein, 587 aa, Zea mays
  VARIANT 492: note = Ancestral polymorphism is R, Derived polymorphism is C
  VARIANT 454: note = Ancestral polymorphism is D, Derived polymorphism is V
MAMIDEPLYPIAVLIDELKNEDIQLRLNSIRRLSTIARALGEERTRKELIPFLSENNDDEDEVLLAMAEELGVFIPYVGGVEHAHVLLPPLETLCTVEETCVRDKAVESLCRIGAQMKETDIVDWFIPVVKRLAAGEWFTARVSSCGLFHIAYPSALDQLKTELRTIYGQLCQDDMPMVRRAAASNLGKFAATVEQNHLKTEIMSIFDDLTQDDQDSVRLLAVEGCAALGKLLEPQDCVAHILPVIVNFSQDKSWRVRYMVANQLYELCEAVGPEPTRADLVPAYVRLLRDNEAEVRIAAAGKVTKFCRILNPQLSIQHILPCVKELSSDSSQHVRSALASVIMGMAPVLGKDATMEQLLPIFLSLLKDEFPDVRLNIISKLDQVNQVIGIDFLSQTLLPAIVELAEDRHWRVRLAIIEYIPLLASQLGVGFFDDKLGALCMQWLEDKVFSIRDAAANNLKRLAEEFGPEWAMQHIIPQVLEKINNPHYLYRMTILQAISLLAPVMGAEITCQKLLPVVINSSKDRVPNIKFNVAKVLKSLVPILDQSVVEKTVKPCLVELSEDPDVDVRYYANQALQACDQMMVSS

SEQ ID NO: 20788 - protein, 899 aa, Zea mays
  VARIANT 777..899: note = Derived polymorphism lacks residues 777 to 899
MPHQGSHRPGAPVQGDPVFPRATSTVLPDPSRFFAPPLLAAPLPTNSFFQNFVLKDGDMPEYIHPYSVRSPGGGALDVCYPSRVHSPSSVTQTFVADLTVSDAAAGSAQRHVVSAFDDLSVTLDVSPSLRAHLVRGCPYVTVTTTAGPIDVSVSSVHAFVELVGSRSSHHGSPGTKWRLRMDSGQTFLLYASAPIHLAQASPTQLSATAFAGAIRVAYLPDASMEPVLDRYSRCFPTAGHAALDPIHRPFRVDYAWHREGPGELLMLAHPLHLRLLALAAADHGENRAARVLYGFRYRSIDGDMVGVVGGCWTLRADPVPPAWHSTRGVRADGVAEVVAALRADVGALAPAAVTTTSSYFYGKAVARAARLAVVAEEVGCADVIPAVREFLTATVTPWLDGSFQENGFLYDATWGGLVTLQGLSDSSADFGFGIYNDHHYHLGYFLYAIAVLARLDPGWGREHAPQAYAMVADFMTVSCNKAGDGGGFFTRLRMFDLWTLHSWAGGLAAIPDGRNQESTSEAVNAYYSAALVGLTYGDARLASLGATLAALEMLAAQTWWHVRDGEGMYEEDFSGSNRVVGVLWANKRDSGLWFAPPEWRECRLGIQLLPLLPISEALFPDVAFVRDLVAWTLPALDRDGVGDWWKGFVYALEGIYDTEAALTKIRALTAHDNGNSLTNLLWWLHSRGPAVTSSGTGTPGVGRGHSPARGGLGRRGRAAHRRRHGGEAAVELPEATLRRGLADPDALVLLAKALHRALLVGDGAAEARILGPGKLERVPDGAGLGHDLLEDVPHARVLVAYDDVLQLDQLGVLLARPVRIVLGRVHTVDEHTLLLVTPGRHTLVGFEPAAVTLIGRLRLGESGLNLPGLRGHIGEHDGEVVRHIAAPLLALHRHPELAA

SEQ ID NO: 20789 - protein, 70 aa, Zea mays
  VARIANT 39..70: note = Derived polymorphism lacks residues 39 to 70
  VARIANT 53..70: note = Derived polymorphism lacks residues 53 to 70
MAEEDDVLTNDYKAMKGDGMNYMIYAMGRMTYLLGEDAEDFRPERWIANGVFQQESPYKFVSFNANAKTK

SEQ ID NO: 20790 - protein, 321 aa, Zea mays
  VARIANT 113: note = Ancestral polymorphism is T, Derived polymorphism is A
  VARIANT 154: note = Ancestral polymorphism is P, Derived polymorphism is L
  VARIANT 157: note = Ancestral polymorphism is A, Derived polymorphism is V
  VARIANT 210..321: note = Derived polymorphism lacks residues 210 to 321
  VARIANT 223: note = Ancestral polymorphism is L, Derived polymorphism is R
MASEAAIARAQCLLRFRRWSPLPLLPLPSPPATTRAASCRRSVRMASSDGSAAALPSATVDVPGAGAPVLVVGAPGLPEADFRNAVESSLFKQWLRNLQSEKGVLTYGRLSLTRVLIQGVDMFGKRVGFLKFKADIVDEETKTKVPGIVFARGPAVAVLILLESNGETYAVLTEQVRVPIGKFLLELPAGMLDDEKGDFVGTAVREVEEETGIKLNIEDMVDLTALLDPATGGRMLPSPGGCDEEIGLFLYRGRVDEETIRSLQGKETGLRDHGELIKLRVVPYSELWRSTGDAKALSAIALYEMAKREGLLPQPTPSANL

SEQ ID NO: 20791 - protein, 698 aa, Zea mays
  VARIANT 325..698: note = Derived polymorphism lacks residues 325 to 698
  VARIANT 307..698: note = Derived polymorphism lacks residues 307 to 698
  VARIANT 197..698: note = Derived polymorphism lacks residues 197 to 698
  VARIANT 120..698: note = Derived polymorphism lacks residues 120 to 698
  VARIANT 83: note = Ancestral polymorphism is R, Derived polymorphism is W
  VARIANT 67: note = Ancestral polymorphism is A, Derived polymorphism is V
  VARIANT 56: note = Ancestral polymorphism is S, Derived polymorphism is L
MPRPMASSSARGRAKDSDPSSSSAAADSSMASLIERATSTTAHAVDPVLLRAIKSSARASDAAIRDAFRLILSLMSKPHSHVRLLAFSIADELFMRSKLFRSLLADSLDGFLPLAVGFRRANPLPPPTTSAALLRKAAVQALERWHHLFGAHYRQLRLAVEYLKESARVQFSGLRATVDARAAREARMQEIYAGKVEQLRENLASIKAEIRSTIDEIRNGLEIIRAEHKKFEGYYVDDEEEIASLSMRSIRTASLMAGEWVPETQENEAVFDALREAHRLLVSKHLVTVQEWITVLVRVNLPDNRFRDSALKDFIDVKNEIRAVRDHCSELGLDLDNFHRRKGDQEEEDNEFWVEGNIEAPNRARVQSSLDVASTSKDTEKGKWVVGGVCHIGKAPVAANGTRNLDPEKSKLLAEAPVLPWSSVLDRWGSSGDVHVNQRGLEVESHWGRVDNDATIPAAKIAELNVHCSIYREAPVEILPCHAPLKKGGLCQRRDLRVCPFHGPIVPRDAEGNPIEQNSGSSDAEVNPVEHLDIGGHSNELNGISDDDYMEGTSSRMTGVNNDYGDIAGTCDLGKITAEQLARQSVKNVRKREMDRKAQERAQRARIRQHNEDVLRNAALASTSYSAAAYEQPTEAHGRRGRRGKAKAPTLASMLKKKVTTKDRIAERLLNTRATDATVRDVSHNEDMSYREAFPNQW

SEQ ID NO: 20792 - protein, 766 aa, Zea mays
  VARIANT 84..766: note = Derived polymorphism lacks residues 84 to 766
  VARIANT 63..766: note = Ancestral polymorphism lacks residues 63 to 766
MTLGERGSQVDASQPHVATYGAPIRSHLAERCGSGPARRATRTEAAAQEQQQHTSSAGSSKHQYLKIKMVNFGKKLMADQIPEWKGYYINYKLMKKKVKQYGQQLQQGEKDRRRVLKDFSKMLDDQIEKIVLFLLEQQGLLASRIEKLGKQRAILQEQPDISGIAELREAYREVGINLIKLLKFVDLNATGIRKILKKFDKRFGYRFTDYYVTSRSNHPYSQLQQVFKHVGVGAVVGALSRNLAELQERQGSYLSIYDQPSSALKDPIIDMINSSVDKLTRSTNFLRFLGQHAMIVDEESPSTAGEEEIEDQKYHFMSLMLNLVNTFLYMVNTYIIVPTADDYSVSLGAASTVCGVVIGSMAVAQIFSSIYFSAWSNKSYFKPLVFSSIVLFLGNICYAMAYDMKSLTVLIIGRLLCGMGSARAVNRRYISDCVPARIRMQASAGFVSASALGMACGPALAGLLQWKFKVYMVTFNQSTLPGWVMAVAWLLYLIWLWFSFKEPNRATEVNEAPQNPASGQTVDIGRLENGIAQPLLKDSVDKQNEDEDEVDDIEETADDSRKPATSIGSAYRLLTPSVKVQLLIYFMLKYAMEILLSESSVITNHYFSWNTSAVAIFLAILGLTVLPVNAVVGTYISNMFEDRQLLMVSQITLLVGIIFSFKVTSTYYVVQYVVSALVTFVSAEVLEGVNLSLLSSVMSSRLSRGTYNGGLLSTEAGTLARVVADCTITAAGYLGVGKLLNVTLLPSLVICVASIACTFLTYNSLF

SEQ ID NO: 20793 - protein, 434 aa, Zea mays
  VARIANT 231: note = Ancestral polymorphism is G, Derived polymorphism is R
  VARIANT 282: note = Ancestral polymorphism is G, Derived polymorphism is C
  VARIANT 299: note = Ancestral polymorphism is A, Derived polymorphism is V
  VARIANT 341: note = Ancestral polymorphism is T, Derived polymorphism is I
MEPVKLVEGYNFDDHTTSDVRVCFKLIDEQPEWFSCHSSVLSQNSKYFSDRLGQNDIRSNSCVEIECPRAQYDHYVKMLKLMYLPGESIVDSFDSVKSALGVLRASNSLGCELVTKGCIAYIEAVPWDDNEEEEILEVARSLGSDAVSLLARLHAPSADAVKNVFISAIRFATCMETLFPPFLDDLKTSAQEQTDFMIHEDDETALVMMDEDVRSVVQEGITKLLSGLRTGLDLLATEFDQSPDQAEKGILCSLADIDWVANLSTKIEMTHAFVSGWSEMSGHILSVVQDSKYSSGLWAVKAKLIEVTGKALDAVGYGTVVLPAPSRFHLLKTWLPYIQTTKRSLDGNSKGEMSLQMDSDMWQNVESAIVSMVLALPSDDQADILSEWMKNAEQFRYPDLTEAFEVWCYRSKTAKRRLVGGLNGSSSSNPTVSS

SEQ ID NO: 20794 - protein, 382 aa, Zea mays
  VARIANT 312: note = Ancestral polymorphism is A, Derived polymorphism is E
  VARIANT 206: note = Ancestral polymorphism is R, Derived polymorphism is C
  VARIANT 184: note = Ancestral polymorphism is A, Derived polymorphism is E
MAVSLPVPIPPALLHAAAALALAAAAHFLHLPSLFLYALHTYIHPDAVPSNTPRAVLRPPGSNAGPAPGSSKRGAAKDKDPFDATSAQLYRLRLSHATLASRPHFAAYHLALLLPLALLLPALLLPAAPGASPLAPLVPAAYLFVALLRHVVVPSPRPALLAAALGALLVTTLLSSSPFAGALASLAALPAARFARAFWLGTDQPRTGLAVLSSSAPARLIFHLTVLVSSTATILRCCGFMDGAEQEAKLLAAAAGLQLLAARPAVQMYLNEAVFCWYQRLHASRAPDTEYGRAKVFLHNHHLCAVATQLVAPPLLVLSLLALWRVQGKDFFEGLEGMYWLVGWSVAMKEAALLAARWIVAVWSAATVITLMCYKRGWLFVS

SEQ ID NO: 20795 - protein, 102 aa, Zea mays
  VARIANT 51: note = Ancestral polymorphism is V, Derived polymorphism is L
MGFWVTTLIFLLAGVAASLFTLLCCNRGPSTNLYAPLMPPPSPSIRFLRSLTRRGALVGLIPFDLGDYSCNLLLDDVCYRLPCSDEAIDQPHPERGVISPLH

SEQ ID NO: 20796 - protein, 425 aa, Zea mays
  VARIANT 59..425: note = Derived polymorphism lacks residues 59 to 425
  VARIANT 17: note = Ancestral polymorphism is A, Derived polymorphism is G
MGNALGCAGLGERLAAGARDGDAAEVRRLLDANPGLARCAAFGSLSSPLHLAAAKGHHEIAALLLENGADVNGRNIYGQTALMQACRFGHWEVVQTLLLFRCNCKCNRPTGDGGYLFRFKVSKADSLSGRTALHVAAAGGHVRCARLLLAGAGSGRSKLVNRAASGGGGGVTALHLAALHGHADCVHLLVDERADVAARTLPCAAPPMASVGAGSAPLHYAAAGGEVKCCQILVSRGADRAAVNCNGWLPVDVARTWGCHWLEHVLSPKSLLPIPRFPPSAYLSSPLASVITLARDCGLALNMSSLPMDTMDGGADDGDACAVCLERPCNVAAEVCGHELCVKCALDLCSVIRSYDAPGIAGTIPCPLCRSGIASFRRRAAAAEAEPGANAGDRQASSSPHKKRSTESDQDGLPLVCAPPAVMSS

SEQ ID NO: 20797 - protein, 138 aa, Zea mays
  VARIANT 91..138: note = Derived polymorphism lacks residues 91 to 138
MLSLSRAIGRRLFSSAEAASTAAVRTAQNPLEEFFEVERSTEEGKPPPHYGRSWKASELRLKSWDDLQKLWYVLLKEKNMLMTQRQMLHSESMRFPNPERISKVKKSMCRIKHVLTERAIAEPDPRRSSEMKRMINAL

SEQ ID NO: 20798 - protein, 79 aa, Zea mays
  VARIANT 5: note = Ancestral polymorphism is S, Derived polymorphism is N
  VARIANT 16: note = Ancestral polymorphism is A, Derived polymorphism is G
  VARIANT 17: note = Ancestral polymorphism is D, Derived polymorphism is N
  VARIANT 19: note = Ancestral polymorphism is V, Derived polymorphism is M
  VARIANT 23: note = Ancestral polymorphism is G, Derived polymorphism is D
  VARIANT 26: note = Ancestral polymorphism is V, Derived polymorphism is G
  VARIANT 32..79: note = Derived polymorphism lacks residues 32 to 79
  VARIANT 43: note = Ancestral polymorphism is P, Derived polymorphism is S
MEAISNTRLALGILVADSVVLVGEKVTSKLFQISRSADVRRPPPLWDLLLIHKVGQAPRRDGRPDLEQCVGERRDGRPS

SEQ ID NO: 20799 - protein, 69 aa, Zea mays
  VARIANT 45: note = Ancestral polymorphism is G, Derived polymorphism is R
MISEKLMVQINLNEGIEEDIPPSQYTTRCEEKLTMTQAAISREAGPLGYDPGEKTFFRSVQGLLAVSRV

SEQ ID NO: 20800 - protein, 187 aa, Zea mays
  VARIANT 149..187: note = Derived polymorphism lacks residues 149 to 187
MQLSFNDTSMKAICGHPPRSRPPAQLAPPTRCLLAVGLGSPTHSRQEMVTEGKQHLEETSAPPAQRWNLDEASRALLMKVLEDATQDVVQRQAKGGGLLRKLEVQEDGDETVFPSSTTNSSSSPFYNVSECAKGGLSVKPKMGDAILFWSMKPDGSLDPTSLHGGCPVIKGNKWSSTKWMRVHEYKV

SEQ ID NO: 20801 - protein, 131 aa, Zea mays
  VARIANT 84: note = Ancestral polymorphism is Q, Derived polymorphism is K
  VARIANT 75: note = Ancestral polymorphism is R, Derived polymorphism is C
  VARIANT 72..131: note = Derived polymorphism lacks residues 72 to 131
  VARIANT 62..131: note = Derived polymorphism lacks residues 62 to 131
  VARIANT 38..131: note = Derived polymorphism lacks residues 38 to 131
  VARIANT 37: note = Ancestral polymorphism is A, Derived polymorphism is T
  VARIANT 30: note = Ancestral polymorphism is C, Derived polymorphism is R
MAVWRRPLGGFGGRRNRGSAENCLESTSCCFTIRKEAKGKNYRYNINRDKGYGGIVLKSWSRWAIYGMLDDQELRYMVLEFVKQLGEALHSVNSKSSSHHLELIYVIPAPRMQKLNNQDFDPKISCIWLTL

SEQ ID NO: 20802 - protein, 616 aa, Zea mays
  VARIANT 125..616: note = Derived polymorphism lacks residues 125 to 616
  VARIANT 206..616: note = Derived polymorphism lacks residues 206 to 616
MLAGCSFSSSRHQMSTAQRFDILPYGFSKRASNRGDGSGAAPRVAAPDARSGGGGGTCSFRAHPAPPVTQAVSWGAKPEPGGNGAAWERSRAVKRAHEEDAGEEYGGPVVRAKRTRMGGDGDKVWFHRSIAGTVQAAGSGDGHEAEEEKAFLVPSAAAFPHGMSAAAAGPSLAVAKKEEFSKSPSNSPASSGGTDGGSSAVPWPEQLHAQNGAAARVEAMELVVALTACADSVAACNHDAANYYLARLGEMASPAGPTPMHRVAAYFAEALTLRVVRMWPQVFDVSPPRELTDGAVAADDDATALRVLNAVTPIPRFLHFTLNERVLRAFDGHDRVHVIDFDIKQGLQWPGLLQSLATRVAPPAHVRITGVGESRQELQETGARLGRVAAALGLAFEFHAVVDRLEDVRLWMLHVKRGECVAVNCVLAAHRLLRDETGAAVADFLGLTRSTGAAILLLGEHEDALNSGRWEARFARALRYYAAAFDAVEAAGLADASPARAKAEEMFAREIRNAVAFEAADRFERHETFTGWRQRMQEGGFQNAGIGDREALQGRMIARMFAPGNYSVQVQGDGEGLTLRWMDQAMYTVSAWTPVSDGGSTVSASVSTTASHSQHS

SEQ ID NO: 20803 - protein, 139 aa, Zea mays
  VARIANT 65: note = Ancestral polymorphism is C, Derived polymorphism is F
  VARIANT 113..139: note = Derived polymorphism lacks residues 113 to 139
  VARIANT 130..139: note = Derived polymorphism lacks residues 130 to 139
MLVATGADAWLQAFGGPTLLPRVKVLASHEEDARKENDMVEEILIPKFLPMDFIPHVLIVCHFFCLWNFHGQIASSKQLVAIGLFRFVLHETCSSPSSSLPPSKLCSTTYGKELDKVTGQKRYTDSNWRQVVTFMFSNY

SEQ ID NO: 20804 - protein, 833 aa, Zea mays
  VARIANT 576: note = Ancestral polymorphism is S, Derived polymorphism is R
MSKYACFPIYLTRLHKLGSRIDSTEERMKKLFGDFEKFNIAANAIAEEPRRYITEDDDIRHRRLVHPNSGDQVGVIGFDEQIKQIEYDLLDTKNRHLTVVSIVGPGGAGKSTMAKKVYSLPAVKGHFKVHCWLTVSQRAVATHDFLKEVVKMVVPSHLMKVMVLRVMGDVKVKKVDNARKMMTEKEEKKIWEDQKAKELEEAKELDKLEEHEVKKLLHEFALSQRYLIVLDDIWSKDAWDAIKHAFPNQKNGSRIILTTRNVDVAKLPGARKKIYRPKLLNEDESTQLLLTTALPEYILDGGQNLDELKELGKELAIKCGGLPLALIVLGGYLSRNLDVGEWKRLLTNSMDWHDLITSDRVIGAILDLSYYDMPSHLRSCFMYTTAFPEDSPIDVRVLAMLWIAEGFIPLVRGQTREKVALKYVAELVQRCMIQAEGWTNSGMIKVVKVHDILREWGFGRAQREGFMKDCHSAEDIEVAYSGEEMMKAYRVVLHSSLSLERGVGTTTRKLRTLLDFNNHTSVQVPKSFQGLRVLHLNCSGEVSLPKDIHQMRYLRYLGLGGNCSYDLPSNIGGLLSLETLYCTASIDHIPASLWRNRTLRQVHIPYARSLSSPQIGSQSSKVLVILVDCGSSTHMDDAKRIVEKTRRQVLRNKNLDLSFCLGVEYGKYGMEVIGRCNTGVQFPIDLLNFDETHDYWELKICCANLLSNDHKILELGRIKNLKVLEIGEQSYTGKVMVFPSGSFMTLERLVLYDLAVEKWKIECGSMICLRVLTLCKCPKLVHLPEELLRLPKLRSLALIAMPLGCYQKGEVPQGVKISESDDEKVFQHLPIWR

SEQ ID NO: 20805 - protein, 322 aa, Zea mays
  VARIANT 254..322: note = Derived polymorphism lacks residues 254 to 322
MLGASPRGRKAAAPPVKLGSAKEAPAAGGGGSGGKVPAEEVWEVRPGGMLVQKRGGGDDEPSPNVKPVPTIRVKVKHAGVTHEIYISSEASFGELKKLVAAKTGLHPDDQKVLYKDRERDSKVFLDTAGVRDRSKVVVLEDPEARARRLIGERRSGHLQKAARAVAAVTAEVDKLAPKVAALDASVRRGEKVAEKDVVQVTELLMNELLRLDAVVADGDVKAQRRMQVKRVQKYVETLDAVAAKNAALVGKSGEKAAAKPAPAPAPAPAPPPRQQGQGQTRWEMFDLLSSLPSTSSASSTTTVSSTASSGAPPPSRPDWMLF

SEQ ID NO: 20806 - protein, 268 aa, Zea mays
  VARIANT 27: note = Ancestral polymorphism is A, Derived polymorphism is V
  VARIANT 16: note = Ancestral polymorphism is H, Derived polymorphism is N
MATVGQSGALRRVTVHYASSPTRGAVVEVSLDDLDDELLQFVLADLLPGQEGLHQSILEGAHGSNQENYMRGAGSSAPSQEYHAQSSTAAAAAAASSRRNPGTDDAQIASDFEYATKLQQEMEGLSVDDDGDGISCVPSPSDSDDGHDHQNEEDEEEEDGNGGGDDDDDPDNMTYEQRQALVESVGSEDRGLSDELISYLQPWKYKASGFFSRKTNHDDCPICLSTFRNRETMITLPCMHHYHAACVTKWLRVNKTCPVCKYELFGPC

SEQ ID NO: 20807 - protein, 508 aa, Zea mays
  VARIANT 289: note = Ancestral polymorphism is W, Derived polymorphism is S
  VARIANT 210..508: note = Derived polymorphism lacks residues 210 to 508
  VARIANT 31: note = Ancestral polymorphism is E, Derived polymorphism is G
MEEAKRLHARLLRRGERRLQPLLLRVLAAGELRYAARLLGSCPASPPSAPLHNRLLHALAAARHPLLLPCFARAHRLRVLTPLSFTLLLSSATATAAACAHALLAKSGHAAAAPGDPFLASALVSSYARAGLLAESRRAFDELPAGAGAGAAAARNAMLSAYARGGRVGDAERLFAGMPDRSVVSWTAMVSGYAQNGRHEEAVRTFLDMWDGAGVRPNELTVSSVLPACAALGALALGRKVERYARGRGMLRNVYVANALVEMYAKCGSIRRAWKVFRGMGTRRDLCSWNSMIMAFAVHGLWTEALALFHKLRMTGAKPDGITFVGVILACTHGGLVDEGKLLFNSMRGEFGLKPRIEHYGCMVDLLGRAGLLKEADSLIASMPMEPDAVIWGALLGACSFHGNFELAEIAVEKLMHLEPHNTANLVILSNIYASCGKWDGVARVWKLLKEKDHKKSAGYSFIELDGRMHKFLVEDKSHPRSEKVYDALDSITLAMKLVSLENPEVES

SEQ ID NO: 20808 - protein, 137 aa, Zea mays
  VARIANT 103: note = Ancestral polymorphism is E, Derived polymorphism is K
MGACATKPKTLEGKAPAEATISTPKVAPETTTIHIEVAAKHAVVEKVEEDKEEALTVAAKQEPAATIEPQQIASEVTTSEVAVVVVEPENKEEEEVVEKTVIEKEKPSAVHAEENIATNKVAAEPTTELKKDTEEEI

SEQ ID NO: 20809 - protein, 325 aa, Zea mays
  VARIANT 3: note = Ancestral polymorphism is L, Derived polymorphism is P
  VARIANT 4: note = Ancestral polymorphism is A, Derived polymorphism is E
  VARIANT 7: note = Ancestral polymorphism is L, Derived polymorphism is F
  VARIANT 33: note = Ancestral polymorphism is R, Derived polymorphism is H
  VARIANT 38: note = Ancestral polymorphism is G, Derived polymorphism is E
  VARIANT 40: note = Ancestral polymorphism is L, Derived polymorphism is H
  VARIANT 49: note = Ancestral polymorphism is G, Derived polymorphism is D
  VARIANT 58..325: note = Derived polymorphism lacks residues 58 to 325
MILEWMFLVELLRKKVDEIRMRGFSGSIQRAGRVVWLGSHVFFNIKSTGRKALFAVLWILCVTRVVQRIAYTEIGKKSYAHGKNARLINSYMAKRLQLQEADQAKRCRRAGREAGAAANRGRLRARSDHPCWQWQWQWQWAVAASSLSAKSGSSTRTTTSSPPSPGEVQRLKRLCLSFALFKLLRRKFERLPAVTSKEAEDCRSLILRGLLHSSSHAGGSSAAAEEVFQVMNDEVVFLSEYYHSVVPVVLASPFFLFVNYFLVLAVVAALCVMTVVLCGNGDAVYANSPEAFFSIVDLSITLLVFVIYFYEEVWEFFVFLLSNWC

SEQ ID NO: 20810 - protein, 82 aa, Zea mays
  VARIANT 25..82: note = Derived polymorphism lacks residues 25 to 82
  VARIANT 21: note = Ancestral polymorphism is E, Derived polymorphism is K
MIKRRTLRTRAIKEVLFTALEMIQWMWMIEAFEVILGKHVLANHVDQMSTDEDEQSINRESIAPYTRSQIVLFWRDCKIQTG

SEQ ID NO: 20811 - protein, 115 aa, Zea mays
  VARIANT 80: note = Ancestral polymorphism is R, Derived polymorphism is C
  VARIANT 94: note = Ancestral polymorphism is F, Derived polymorphism is C
MEGLILTTAQCNIWIWKTISVVMGDLLCEAMGSAAQVVVVEDCVETPRTFVLHLLLKRALAGCGSAAFLALAQPFSHYDRVLRKMVPLAPRPLFTSPAFRQTRFVLTGFMSGCLC

SEQ ID NO: 20812 - protein, 256 aa, Zea mays
  VARIANT 7: note = Ancestral polymorphism is E, Derived polymorphism is K
  VARIANT 17: note = Ancestral polymorphism is A, Derived polymorphism is V
  VARIANT 93: note = Ancestral polymorphism is P, Derived polymorphism is T
  VARIANT 94..256: note = Derived polymorphism lacks residues 94 to 256
  VARIANT 101: note = Ancestral polymorphism is R, Derived polymorphism is S
  VARIANT 148: note = Ancestral polymorphism is G, Derived polymorphism is D
  VARIANT 193: note = Ancestral polymorphism is R, Derived polymorphism is S
MEEHGAEDLLCEAMGSAAQVVVVEDCVEAPGAFVLHLLLKRALAGCGSAAFLALAQPFSHYDRVLRKMGCNLSLHRRNERLHFFELLGFPGKPSFYCSGAREGTIADSFALLYNEIQRLVEANRAGENEGQFTIVIDDASLLEVVALGSVSDVLDFLHYCFTLTSEMNCKLVILIHEDIYANEENMGLLLHLRYIADLVIKAAPLSTGLAADVHGQLAVVNKGTFSEQRAKAQKVWNFHFKVKENGADFFYPGSRH

SEQ ID NO: 20813 - protein, 238 aa, Zea mays
  VARIANT 42: note = Ancestral polymorphism is E, Derived polymorphism is K
MVAALGPGRFYGSGLPRPRFFPGDRVDPPASVTDPLLDWAREAHWSMGGFGVKRLRLQGRIEGSIDKLRRRTRRDARAKTKARSAGHVPASLSPLGSEDEAEEVAAPERALVDDDVDSDGSDESEGEEEDEPLAAIVTAAKKRRARKLSDEFDRIAAEQQYQLVVEKKRKAGAAKPARTSPRKQASAPAAGSSPKRKQASAPAAGAPAMVSPKRKAAAPAAAPSSAAGARRTSPRNKH

SEQ ID NO: 20814 - protein, 386 aa, Zea mays
  VARIANT 18: note = Ancestral polymorphism is G, Derived polymorphism is R
  VARIANT 345: note = Ancestral polymorphism is L, Derived polymorphism is P
MASTALVAVAVGGAISLGLVASSGVASCSLRAGGDSRRFGPRLVLLRRGGAEGEGTRTRNCPIFRCANKVDVVTEDDSVDGDVTDDGEDLEDAADDAIDADVGTEDELESSLPEDVEWIKQQPLPYPLDALEPYISKETVEQHWGVHQQIHVDRLNGMIGGSEWEGMSLGQMMLASFNEGREQPHPPFFHAAQVWNHDFYWRSMKPGGGGKPPERLLKFINRDFGSHEGMIRQFMDAALTQFGSGWVWLSYKGSGLPYVKSRSPIPSDNHGRLVISKTPNAINPLVWGHSPLLAIDVWEHAYYLDYEDRRADYVSAILEKLVSWETVESRLAKAVARAVERDEHLRRRILRKQRLAQANGQSRARSRARQGRQGDQEVARSRPVEA

SEQ ID NO: 20815 - protein, 91 aa, Zea mays
  VARIANT 33: note = Ancestral polymorphism is Y, Derived polymorphism is N
MGLQEEFEEHAEKAKTLPATTTNESKLVLYGLYKQATVGDVSTGRPGIFSLKERAKWDAWKAVEGKSKDEAMADYITKVKQLLEAAAASTS

SEQ ID NO: 20816 - protein, 101 aa, Zea mays
  VARIANT 52: note = Ancestral polymorphism is W, Derived polymorphism is S
  VARIANT 15: note = Ancestral polymorphism is R, Derived polymorphism is C
  VARIANT 10: note = Ancestral polymorphism is T, Derived polymorphism is I
MVVDTNIKGTANVLRHFVPLMIEKRHGIIINLSSGWGRSATAEVAPYCASKWAIEGLTRSLAKELPPGLAAIALSPVVVNTDMLNSCFGSSVALYQTTETW

SEQ ID NO: 20817 - protein, 600 aa, Zea mays
  VARIANT 300: note = Ancestral polymorphism is P, Derived polymorphism is L
MCLLRSFSHANVTPAAHAVEDMASTFGATSTVGLMAAPTGKNVRLQRRANFRVKAAKELYFNKDGSAIKKLQTGVNKLADLVGVTLGPKGRNVVLESKYGSPKIVNDGVTVAREVELEDPVENIGAKLVRQAAAKTNDLAGDGTTTSVVLAQGLIAEGVKVVAAGANPVQITRGIEKTAKALVEELRKLSKEVEDSELADVAAVSAGNNYEIGNMIAEAMSKVGRKGVVTLEEGKSSENFLYVVEGMQFDRGYISPYFVTDSEKMTAEYENCKLLLVDKKITNARDLINVLEEAIRGAYPILIIAEDIEQEALATLVVNKLRGSLKIAAIKAPGFGERKTQYLDDIAILTGATVIRDEVGLSLDKADKSVLGTAAKVVLTKESTTIVGDGSTQEEVTKRVAQIKNLIEAAEQEYEKEKLNERIAKLAGGVAVIQVGAQTETELKEKKLRVEDALNATKAAVEEGIVVGGGCTLLRLAAKVDAIKDTLENDEQKVGAEIVRRALSYPLKLIAKNAGVNGSVVTEKVLSNDNFKYGYNAATGQYEDLMAAGIIDPTKVVRCCLEHAASVAKTFLTSDVVVVDIKEPEAAPVANPMDNSGYGY

SEQ ID NO: 20818 - protein, 309 aa, Zea mays
  VARIANT 263..309: note = Derived polymorphism lacks residues 263 to 309
MDPRLKPSQWDRWNSKEARNPPNAWGRHRNMSWRLRPSHVKSEGEVIGSSSGDMNNPDPQTNECDKCNEEGENLGDENNEKVDFEDSDEDLLSSQELNNFVKGMGVEIADEQELEMDEGELLKVQDEQQTGKDKKGKAKLVDQVEGTRKSSRLEANEDIRITDKAINRAEAKDAFLNIGNNPNPFSILNSENSLLIDIANKLGVNLGKDDNERLDNLEMIKCLEEERAKAIMPDVGVDDIDNKFAGNLVENEDPSIMDRIVQEMIESESEGKKNKTPKKKKKIQKEKKYSLRKKRVLQKLDIHLIIGDA

SEQ ID NO: 20819 - protein, 79 aa, Zea mays
  VARIANT 27..79: note = Derived polymorphism lacks residues 27 to 79
MNMSNMCGATILVLFLFVFLAQCRPHELDVVGTSYGITKRKDVFCQAGHIDNKLVYYCMHQKPKPICYDTLQECLAKCL

SEQ ID NO: 20820 - protein, 397 aa, Zea mays
  VARIANT 213: note = Ancestral polymorphism is I, Derived polymorphism is V
  VARIANT 386..397: note = Derived polymorphism lacks residues 386 to 397
MQSPITVSGTSASTKAAPDTCGIQGWADLPGGPLQSIVALLGSFIDLLAFASTCRSWRAAFSSYPSKSRFCALLPPLLVRPNVSVRAPDGHELRRWQVIDLANTKADLCCQIPQEICKAMHFAGSSYGQLICGLRKDCIIVDVFTGARVWAPPLPLNDDTFFYSGMLTAPLALENSHLLVCVVSSQHSIPASLLDWSVGSNSWSEIQLGNSLIEQIVEFNGQFIVMDSYYRLYTLSLAPRLGLQEMATVWWDNMPGCPFRRPWLLVCSGMLLIVDYYLSFSSSGARAPVNYKAYRLDTSTEPATWVDVVKLENDALFIGGDVRSPPFSCMSPGRWGGRSNCLYYAHYRQPWVLHGLGDDADAIWDDSTDPGLGFKRDWYIQLQPFWVYPSMFYSDGQ

SEQ ID NO: 20821 - protein, 51 aa, Zea mays
  VARIANT 45: note = Ancestral polymorphism is A, Derived polymorphism is S
MFLDGADHLLSIRFFAGIQNSACCQINKQPMRNYLHTTEMGLHLSMDLHLG

SEQ ID NO: 20822 - protein, 1171 aa, Zea mays
  VARIANT 384: note = Ancestral polymorphism is S, Derived polymorphism is Y
  VARIANT 786: note = Ancestral polymorphism is L, Derived polymorphism is H
  VARIANT 800: note = Ancestral polymorphism is N, Derived polymorphism is Y
  VARIANT 824..1171: note = Derived polymorphism lacks residues 824 to 1171
MAAAEPCCISHAFERATRQEPGRLAVIHAAASGADSEERRFTCGDLLAAVGSLSRRIAAALGSTATDTRRDREQGSGFRAAGAVVPRVVGVYASPSLEYVAAVLAVLRCGAAFLPLDPSWPEERVSWAISASNAALVVSSVGSRGATLFESSACPVLRFYGGIRRRFRDGNGGDDGEELVWPCEHEWHRKFCYVMFTSGSTGKPKGVCGTEKACLGLLNRFLWMQRRNPLCSDDVLLFKTSVSFVDHLQEFLSAVLTCSTLVIPPSEWRANPASLANLIKVYRISRMTLVPSLMEIILPTLAEKLSDGCNPLKILIFSGEVLSVSLWKRVYEFLPEATIINLYGTTEVSGDCAFFDCKKLPTILEQEELNSVPIGFPISNCEVSLVTNDGLSDEGEISVSGACLFTGYLADPMTSNCPEGSEVLAYYRTGDFARRLKTGELIFLGRKDRIVKIYGHRFSLEEVESTLRDHPDVSDAAVTFQSNGSLDFKAYLVLRSNNKFLKCTQGYSGLHSSRDIIAPLRNWLIMKFPLAMVPRLFIPMKSLPLTLSGKIDYVKLSSLVCAFEPCEIHPESSPADPHMQVIKKAFSDALLVHEVSEYDDFFSLGGNSITAAHVAHKLEIDMRLLYIYTTPSKLFHGLLGEHSHVIPPTPEFHNRKKLRKYASISDSFGPVSEYLDSNFHDQGQISKEGAYDHFAGNHVSDIDGQLSKSRTYNTYQAKNLCPDTCSNDEIFSGRPWILNFHLQKVWSIGRCNRFMHGSEGMVHLEDICSYVPYNKKGYLVKIWSILLDSCVDASPLLVINNGMMSIFIGSHSYLFLCIDGYSGSVRWSVKLEGRIECSAAITGDFSEVVVGCYKGKIYFLDMSTGKLSWTFQTDGEVKMQPVVDKMRNLIWCGSYDHYLYALNYKDRCCTYKVFCGGSIYGSPAIDMAQNVIYVASTSGLVTAVSFKEPSFRVLWQYEAGAPIFGSLAIDHQSGTVICCLVNGLVMTLNSQGSVVWKATVGGPIFAGACLSPTLPHQVLIPSRDGNLYSFDTVSGALLWVYKAGDPITASTFVDELLTSVSFGPSERFACICTSSGKVHVIRIRVDIRTRVDAKYNQEQGGDGVKSEELVQGLDAKYNQEQAGEGAKSEELVQGLASIDLPGDIFSSPLMVGGRIFVGCRDDRLHCLTVTT

SEQ ID NO: 20823 - protein, 476 aa, Zea mays
  VARIANT 72: note = Ancestral polymorphism is H, Derived polymorphism is Y
  VARIANT 74: note = Ancestral polymorphism is A, Derived polymorphism is V
  VARIANT 313: note = Ancestral polymorphism is V, Derived polymorphism is A
MAGEPSAAVASGPESAAEADRLLALAESELSAGRLRAARRHALRAARLYPTSPRAPVVATAANVLLADASSHHAALLLPEPDDPDASPLSASELRRHFKSLVKSLRVGLDAATAAAYPSVAAAAEEALGRATEAYEALTAPAPGTFWTACAGCRLLHEFERKYVGYRLACPSCRRTFIAVEVTPPPEDEPVARRPAPQRLPPAKRPEKMEMTLAEMQLQLVKKRRGAEVPETSSRDLVVAEEEEDAAAEEAEAENNHLDLMPVEDSDFYNFDADRGERCFKRGQLWALYVDADGMPRHYALVDEVQRGTQFRVQIRWLDGEEGKPGKPCGQFNVGRADTVDSVNVFSHLLACERAASEVYRVYPRKASVWALHGGDRAKIKYDIVVILSGYDDRYGASFGYLEKVEGFRSIFTRRDIGSHAVHFLQKGDLGALSHQIPARKVPKGEGSVLPPGDCWELDPASLPPELLCLCIEPPK

SEQ ID NO: 20824 - protein, 1147 aa, Zea mays
  VARIANT 215..1147: note = Derived polymorphism lacks residues 215 to 1147
  VARIANT 104..1147: note = Derived polymorphism lacks residues 104 to 1147
MASTGGGGGLRHSNSSRLSRMSFSGGGSDDARAQAAAAPGGDLSPDRDEQFASYHVHIPATPDNQPMDPAISARVEEQYVSNSLFTGGFNSVTRAHLMDKVIDSEASHPQMAGARGSSCAVNGCDANVMSDERGDDILPCECDFKICAECFADAVKNAGAICPGCKEPYKNTELDDVVGAAADATAGGRPTLSLPPPPGAAASRMERRLSIMRSQKAMTRSQTGDWDHNRWLFETKGTYGYGNAIWPKENEVDAAGGLGGGGADGQPAEFTTKPWRPLTRKLSIPAGVLSPYRLLILIRMAVLGLFLTWRIKHKNEDAIWLWGMSVVCELWFGFSWLLDQLPKLCPVNRATDLAVLKDKFETPTPSNPTGRSDLPGLDIFVSTADPEKEPPLVTANTILSILAADYPVEKLSCYVSDDGGALLTFEAMAEAASFANMWVPFCRKHNIEPRNPDSYFNLKKDPYKNKVRQDFVKDRRRVKREYDEFKVRINGLPDSIRRRSDAYHAREEIKAMKRQREAALDDAVEPVKIPKATWMADGTHWPGTWIQPSAEHTRGDHAGIIQVMLKPPSDDPLYGSTGDEGRPLDFTEVDIRLPMLVYVSREKRPGYDHNKKAGAMNALVRSSAVMSNGPFILNLDCDHYVYNSQAFREGMCFMMDRGGDRIGYVQFPQRFEGIDPSDRYANHNTVFFDVNMRALDGLMGPVYVGTGCLFRRVALYGFDPPRSKEHGGCCSCCFPQRRKIKASAAAPEETRALRMADFDEDEMNMSSFPKKFGNSSFLIDSIPIAEFQGRPLADHPGVKNGRPPGALTVPRDLLDASTVAEAVSVISCWYEDKTEWGHRVGWIYGSVTEDVVTGYRMHNRGWKSVYCVTKRDAFRGTAPINLTDRLHQVLRWATGSVEIFFSRNNALLASRRMKFLQRIAYLNVGIYPFTSIFLIVYCFLPALSLFSGQFIVKTLNVTFLTYLLVITLTLCLLAVLEIKWSGISLEEWWRNEQFWLIGGTSAHLAAVLQGLLKVVAGIEISFTLTSKSGGDDVDDEFADLYIVKWTSLMIPPIVIMMVNLIGIAVGFSRTIYSEIPQWSKLLGGVFFSFWVLAHLYPFAKGLMGRRGRTPTIVFVWAGLLSITISLLWVAINPPSQNQQIGGSFTFP

SEQ ID NO: 20825 - protein, 220 aa, Zea mays
  VARIANT 104: note = Ancestral polymorphism is G, Derived polymorphism is C
  VARIANT 25: note = Ancestral polymorphism is M, Derived polymorphism is T
  VARIANT 19: note = Ancestral polymorphism is L, Derived polymorphism is H
MFIRKAYRSSLQEGAVNPLGLGFVMATLFSSYGLAVWYGSKLIVERGYNGSMVISVIMSVMIGVMSLGQATRSVTAFAEGQGAAHRMFKIIERKPDIDIDDNTGIILEDVKGDVQLKDVYFSYPTRSEFSLQVPSGTTMALVGDNGSGKSTVISLVERFYDPHAGEVLIDGVNIRRMKLGWMRGKFGLVNQEPVLFSTTIRENIAYEIEKPTLEDIKRAI

SEQ ID NO: 20826 - protein, 480 aa, Zea mays
  VARIANT 164: note = Ancestral polymorphism is Y, Derived polymorphism is H
  VARIANT 161: note = Ancestral polymorphism is A, Derived polymorphism is V
MLGVGMAAAVLLGAVALLLADAAARRAHWWYREAAEAVLVGAVALVVVDAAARRAHGWYREAALGAARRARLPPGEMGWPLVGGMWAFLRAFKSGKPDAFIASFVRRFGRTGVYRSFMFSSPTVLVTTAEGCKQVLMDDDAFVTGWPKATVALVGPRSFVAMPYDEHRRIRKLTAAPINGFDALTGYLPFIDRTVTSSLRAWADHGGSVEFLTELRRMTFKIIVQIFLGGADQATTRALERSYTELNYGMRAMAINLPGFAYRGALRARRRLVAVLQGVLDERRAARAKGVSGGGVDMMDRLIEAQDERGRHLDDDEIIDVLVMYLNAGHESSGHITMWATVFLQENPDMFARAKAGSFFLSFFAEQEAIMRSIPSSQRGLTLRDFRKMEYLSQVIDETLRLVNISFVSFRQATRDVFVNGYLIPKGWKVQLWYRSVHMDPQVYPDPTKLARTNPRCRVRYLPHPRPVDNCLAKITRVGS

SEQ ID NO: 20827 - protein, 252 aa, Zea mays
  VARIANT 82: note = Ancestral polymorphism is D, Derived polymorphism is H
  VARIANT 120: note = Ancestral polymorphism is V, Derived polymorphism is M
  VARIANT 161: note = Ancestral polymorphism is E, Derived polymorphism is K
  VARIANT 182: note = Ancestral polymorphism is E, Derived polymorphism is G
MAATAPNGNPTVSSLAATVPVQAVLFDIDGTLCDSDPLHHVAFQEMLLEIGYNNGVPIDEEFFIKNIAGRSDVEAAQNLFPDWELEKGLKFLEDKEAKYRSLAKERLVPVKGLAKVVQWVKDHGYKRAAVTNAPRINAELMISLLGLSDFFQAVIVGGECEQPKPAPYPYLRALKELQVSAEHSFVFEDSPAGIRAGVAAGMPVVGVATRNPEKSLVEAGAALLVKDYEDPKLWAALEEMDGEEAKLKKASE

SEQ ID NO: 20828 - protein, 277 aa, Zea mays
  VARIANT 24: note = Ancestral polymorphism is Q, Derived polymorphism is K
  VARIANT 100: note = Ancestral polymorphism is D, Derived polymorphism is A
  VARIANT 108: note = Ancestral polymorphism is A, Derived polymorphism is D
  VARIANT 136: note = Ancestral polymorphism is R, Derived polymorphism is H
  VARIANT 140: note = Ancestral polymorphism is G, Derived polymorphism is S
  VARIANT 180: note = Ancestral polymorphism is R, Derived polymorphism is Q
MCRQHQHSSSDHKTKRSLSFGIQQQLAMESSGIGRVAPLEAVLFDIDGTMAISDPFHHRATSEMLLKVGYNNGVPITPEFGMANMAGRSNEQIGRFLFPDWDQRRLDAFFAEKEALFARYAAEGLREIAGLTPLCRWAAGRGLRRAAVTNAPRANAELMISILGLSDFFSLVVTAEECGRSKPYPDPYLRALDLLGVSPDHALVFEDSTTGVQAGIAAGMPVVAIAEESREDKLLAVGATLVIRDYEDPKLWAALDKLDTTRPQAAAAETNGKLTQL

SEQ ID NO: 20829 - protein, 768 aa, Zea mays
  VARIANT 143..768: note = Derived polymorphism lacks residues 143 to 768
  VARIANT 137..768: note = Derived polymorphism lacks residues 137 to 768
MAKRPRHAGNGPGRSQLVPFEWKLHRLILNGGLAGPGASAEDVADALRVHHPEFRRQKQGPFVASVRRALTSIPIPSPSSSDSSDDGSSASRRRGHHDAHATTSSSTSVSDAAARPSPPAPAYDVTKSMLRSQYAAQTPKRSQQLEIEVAAEKPRRLITADGGGGGDAKPEAAPASEGFGRGDKGPRFADLGGMEAVIEELMMEVVVPMCHPEIPHRLGVRPVAGLLLHGPPGCGKTTLAHAIANETGVPFYKISAPEVVSGVSGASEENIRGLFQKAYRTAPSIVFIDEIDAIASKRENLQREMERRIVTQLMTCMDQFHQNIGSGSSNLEAESSEKKPGYVIVIGATNRPDAVDQALRRPGRFDREISLGVPDENARKQILKMLTQHLRLEGEFDLFKIARATPGFVGADLKALVDKAGNLAMKRIIDERRARCCIEQDGSSKHDWWRQPWDESEVDELHITMNDFEEAAKMVQPSLRREGFSSVPGVTWDDVGGLDSLRKEFDRCIIRCIKHPEDYEVFGVNMQAGFLLFGPPGCGKTLIAKAVAHEAGANFIHIKGPELLNKYVGESESEVRKIFTRARTNSPCILFFDEVDALTTKRGKEGGWVVERLLNQLLIELDGADQRQGVYVIGATNRIDVIDDAVLRPGRFGKKHYVPLPGADERVSILKAHARSKPISTDVDLDALGRRAECNNLTGADLASLVNEAAMAALEERLEFRDKGTSSLSSSSLIEMPHFERALSKIKPSVSEQQIKNYEALSMRYSSN

SEQ ID NO: 20830 - protein, 154 aa, Zea mays
  VARIANT 130: note = Ancestral polymorphism is C, Derived polymorphism is Y
MLMGFPVGYSETPKLLLHLLFLLDHLRRLSSWLLRLAGAADADADTDAGHPRHPCAAAQRLEEHSPAVRFDSLSCGSGGGVTAPRPLPEGCCVCLGDFHAAAEVRRARGCRHVFHRACLDRWAAHGHRTCPLCRTPLLPPLPLPLPLPLPLPPS

SEQ ID NO: 20831 - protein, 338 aa, Zea mays
  VARIANT 220: note = Ancestral polymorphism is D, Derived polymorphism is V
  VARIANT 249: note = Ancestral polymorphism is V, Derived polymorphism is I
  VARIANT 254: note = Ancestral polymorphism is W, Derived polymorphism is C
MVAAPSKCRPSAAALVVAPPGAPRRQLRCRCCEDTLGVPRRRLQPQLHLKQQAPAATTAPAAAPPPRPRRIVLVRHGESEGNVDEAAYTRVPDPRIGLTAKGWREADDCGRRLRDLFSSGSRDQDDWKVYFYASPYRRSLETLRGIGHAFEPHRIAGVREEPRLREQDFGNFQDREQMRVEKEIRQRYGRFFYRFPNGESAADVYDRITGFRETLLSDIVLGRFQPPGHRSTSGDMNIVLVSHGLTLRVFLMRWYKWTVRQFEGLENLANGGELVMQTGEGGRYSLLVHHTPDELRAFGLTDEMLQDQMWQKTARPGELNHRFMTNGQSFFDPFTVIY

SEQ ID NO: 20832 - protein, 161 aa, Zea mays
  VARIANT 7: note = Ancestral polymorphism is S, Derived polymorphism is C
  VARIANT 51: note = Ancestral polymorphism is N, Derived polymorphism is T
  VARIANT 58: note = Ancestral polymorphism is L, Derived polymorphism is F
  VARIANT 97: note = Ancestral polymorphism is D, Derived polymorphism is G
  VARIANT 124..161: note = Derived polymorphism lacks residues 124 to 161
MMTSSACYYLCRSLVRAPPLKSRSAVRCPSAAPPGASGATSTSKTQDPVENQKLCAYLVEKAVNRLPPGAENILGIFDLRGFRVENGDLQFLKFLMDVFYYYYPKRLGQVLFVDAPFVFQPMWQVVKPLLKSYASLVRFCDTETVRKEYFKEETVPPDFRD

SEQ ID NO: 20833 - protein, 514 aa, Zea mays
  VARIANT 58: note = Ancestral polymorphism is P, Derived polymorphism is T
  VARIANT 158: note = Ancestral polymorphism is L, Derived polymorphism is F
  VARIANT 352..514: note = Derived polymorphism lacks residues 352 to 514
  VARIANT 437: note = Ancestral polymorphism is C, Derived polymorphism is W
MMTVSTSCYMCRFLVRAPPLKSRSAVRCPSAAPPGASGATSTSKLVLEVKERLAREHPGLPTGRYGRDDDDMVLWFLKDRKFSVDEAVSKLTKAIKWRQDFGVAELSEESVKSLYQTGKAYVHDSLDIYGRPVLIVVAAKHFPSTQDPVENQKLCAYLVEKAVNRLPPGAENILGIFDLRGFRVENGDLQFLKFLMDVFYYYYPKRLGQVLFVDAPFVFQPMWQVVKPLLKSYASLVHINQLHSGRLNCNTTTSAITEKSGQQRRGSSDPHVQMPAWSFTWFQEESFPSSSAVVAKASPASPCAAPHFRPRAVRAAIRAQASAVEAPATAKAKKESKKQEEGVVTNLYKPKEPYVGRCLLNTKITGDDAPGETWHMVFSTEGPSLPARGLRIRGEKKRKEKMMTVSTSCYMCRSLVRAPPLKSRSATQDPVGNQKLCAYLVEKAVSRLPPGVENILGIFDLRGFRVENGDLQFLKFLVVKPLLKSYASLVRFCDAETVRKEYFKEEIVPPDFRD

SEQ ID NO: 20834 - protein, 355 aa, Zea mays
  VARIANT 289..355: note = Derived polymorphism lacks residues 289 to 355
  VARIANT 303: note = Ancestral polymorphism is L, Derived polymorphism is P
MATVMAAAVSSFPSSSAVVAKASPASPCAAPHFRPRAVRAAIRAQASAVEAPATAKAKKESKKQEEGVVTNLYKPKEPYVGRCLLNTKITGDDAPGETWHMVFSTEGKIPYREGQSIGVIADGVDKNGKPHKVRLYSIASSAIGDFGDSKTVSLCVKRLIYTNDAGEIVKGVCSNFLCDLQPGDNVQITGPVGKEMLMPKDPNATIIMLATGTGIAPFRSFLWKMFFEKHDDYKFNGLGWLFLGVPTSSSLLYKEEFGKMKERAPENFRVDYAVSREQTNAAGERMYIQTRMAEYKEELWELLKKDNTYVYMCGLKGMEKGIDDIMVSLAEKDGIDWFDYKKQLKRGDQWNVEVY

SEQ ID NO: 20835 - protein, 190 aa, Zea mays
  VARIANT 17: note = Ancestral polymorphism is T, Derived polymorphism is M
  VARIANT 92: note = Ancestral polymorphism is R, Derived polymorphism is S
  VARIANT 110: note = Ancestral polymorphism is A, Derived polymorphism is G
MKTILASETMDIPEGVMVTVAAKLVTVEGPRGKLTRNFKHLNLDFQLQEAGRKLKVDAWFGTRRTMAAIRTAISHVQNLIKGVTKGYRYKMRFVYAHFPINASITNSNTAIEIRNFLGEKKVRKVDMLDGVTILRSEKVKDELILDGNDVELVSRSAALINQKCHVKKKDIRKFLDGIYVSDKGVIEEEQ

SEQ ID NO: 20836 - protein, 190 aa, Zea mays; identical to SEQ ID NO: 20835
  VARIANT 17: note = Ancestral polymorphism is T, Derived polymorphism is M
  VARIANT 92: note = Ancestral polymorphism is R, Derived polymorphism is S
  VARIANT 110: note = Ancestral polymorphism is A, Derived polymorphism is G

SEQ ID NO: 20837 - protein, 443 aa, Zea mays
  VARIANT 168..443: note = Derived polymorphism lacks residues 168 to 443
MAPPAAQAQLLLSNHPSPLLSPPQRRRLLGGPPPRSHTCAIRHHHGHDKCASSSSTRLRHALRPPAATAVAIAPGDHWGNWAFLLSAAAFGTWAEENTSWGAALSGALVSIMAGLAATAVGLVTPGAPAHDAVMEYLLPAAVPLLLLGADLRRVVRTTGDLLKAFLLGSVATVIGTTVAYLLIPMRSLGQDSWKIAAALMGSYIGGAVNYVAISEALGLTPSVLAAGVAADNLISALYFMALFSLASNIPAEPKTATASPQKDGERLSVLNGGAAVALSFIICKAGSAMAARLGLQGGTLPCVTALAVFLATAFPAPLSRLAPAGETLALILMQLFFAVVGANGNVVDAVTRAPSVFAFALVQVSVHMAVVLAAGRVIGIDRKPLLIASNANIGGPTTAAAMATAKGWTSLVVPGILVGIFGISIATFLGIGYGMFVLRRIRG

SEQ ID NO: 20838 - protein, 316 aa, Zea mays
  VARIANT 270..316: note = Derived polymorphism lacks residues 270 to 316
  VARIANT 296: note = Ancestral polymorphism is R, Derived polymorphism is G
MVSTSSTPHPLDPSVPAVVGGGKEEEEEAVESCAAAAATPLPPVGIDDEEEGPRRVRKPYTITKSRESWTDPEHDKFLEALQLFDRDWKKIEAYVGSKTVIQIRSHAQKYFLKVQKNGTGEHLPPPRPKRKAAHPYPHKSSKKALQVVLPQQVSHIMEQGCGTPMDVATVATDSSVNNAFPVQHFSPRHTQAMPDFARVYNFLGSIFDPETNGHLQKLKEMDPIDAETVLLLMKNLSINLTSPNFEEHLADPVSLVENAICCSLDSDPYWAPLSTAEEVALFGCLKHGSKVGLFPGSSPVHVILTRSRYFVDLTPP

SEQ ID NO: 20839 - protein, 163 aa, Zea mays
  VARIANT 11: note = Ancestral polymorphism is I, Derived polymorphism is F
MEMEKMMGCQIPAFGMWNYCSDLSITQYFDSAMQARLMKRWNCRGSAAAAAVVVGEKGGVAGGEQLVLFRTPSFQRKPAAQIKVIRREVEKHCDGANELQDGGVRAAEAAVAYPVMKRKVIVSQAVDEDLYKVPQPPMYEKPRKMRRVVWSMWIGCLGLDCVA

SEQ ID NO: 20840 - protein, 490 aa, Zea mays
  VARIANT 361..490: note = Derived polymorphism lacks residues 361 to 490
  VARIANT 305: note = Ancestral polymorphism is M, Derived polymorphism is I
  VARIANT 166: note = Ancestral polymorphism is R, Derived polymorphism is L
  VARIANT 79: note = Ancestral polymorphism is P, Derived polymorphism is L
  VARIANT 71: note = Ancestral polymorphism is A, Derived polymorphism is T
MATINFTVHRRPAVLVAPASPTPRELKRLSDFDDQESLRFRIPVIHFYQRKESMAMGCSGDPAVVIRDAVARALVPYYPFAGRLREHDGGKLAVDCTGEGVLFVEADADVCLEQFGDVLLPPFPCLEELIFDDAPPAAAGAAILHTPLLLIQVTRLACGGFVLALRLNHTMADALGLTQFLGAVAELARGVAQAPTVRPVWERHLLEGQRNPPRIISDGLDLWYEAEMADDDGDNIIPSSLNLKDDDMALRSFFFGPGEIAAIRDQLSPDLRKRASRFDVIAGWLWKHRTMALAPDYSADEPMLMLVVVNARGRDREATGCAGIPTGYYGNAFAIPVAVSTSGKLCANPVSYAVGLVKEAKDKVDMEYMRSAANLIVHRGRRSPRFTVGMYSLTDETKARFHDLDFGWGRPVYGGPAEAVGTPALPWLSSFILPFKNASGEDGAVVPVCLPRLAMDRLVDEMGKMRRRRSPAEVQQPRHGFPVIVKRSAL

SEQ ID NO: 20841 - protein, 134 aa, Zea mays
  VARIANT 113: note = Ancestral polymorphism is A, Derived polymorphism is G
  VARIANT 104: note = Ancestral polymorphism is L, Derived polymorphism is H
  VARIANT 92: note = Ancestral polymorphism is E, Derived polymorphism is V
  VARIANT 85: note = Ancestral polymorphism is A, Derived polymorphism is T
  VARIANT 82: note = Ancestral polymorphism is R, Derived polymorphism is H
  VARIANT 79: note = Ancestral polymorphism is D, Derived polymorphism is V
MPDHQIAAMEPDPIAVGASSSPARASELYRECGRPQPASDALAKGASALEEKSPEEAIKMYDEACSVLEEDGKEQMAFDLYHAAAALYIKMVKYSDAGALFLRLGSAADKCNAINSQCKAYLSAIIIYLYTHDF

SEQ ID NO: 20842 - protein, 500 aa, Zea mays
  VARIANT 348: note = Ancestral polymorphism is A, Derived polymorphism is V
  VARIANT 311: note = Ancestral polymorphism is T, Derived polymorphism is M
  VARIANT 157: note = Ancestral polymorphism is A, Derived polymorphism is P
  VARIANT 150: note = Ancestral polymorphism is D, Derived polymorphism is N
MSELPDGGAGGNGQDEAAAFASPAKRLRRSPALEPTSVLYNRSPSPPTSSSLVSSAAPEPPPISAEDWEAVLSGGDMAAPPAAARSQDASFLRWIMDADAQVDAFDPFLPCQETAVVEPFLQPQLPLPVADDLEPGATVDELLEAVRRADAGDSTGAREILARLNHRLPSPPGHPHPPILRAAAHLRDALLRVLVTSAPAPAAVSTTPLDVALKVAAHRALADASPTVQFANFTSTQALLDALGTARRVHVVDLDVGFGGRWAPLMQELALQWRRAPVSPLPPPCLKVTALVSPGSSAHPLELHLTHQGLTRFAADLGISFEFNAVAFDPLDPLPPTGLSVAPGDAVAVHLSVGSGVPSAATLRVVKQLRPAVVVCVDHGCHRGDLPLSHHALSVVRSSAAFLESLDAAGAPADAVARLEEYVVRPRVERLLLGDRMPPWRTMLDSAGFAPVQLSNAAEAQAECLVRRTPTPGFHVEKRQAALALRWQDSELVMVSAWRC

SEQ ID NO: 20843 - protein, 287 aa, Zea mays
  VARIANT 274: note = Ancestral polymorphism is E, Derived polymorphism is K
MQHSGQRDKKCGRDGPSSRTAEVRTGERPQQTRDRRERASKPSIVTSLCFSLSSLLVFCKKPVTVSVSLIPFHHSAGLPLPPLVLAMASSASRFIKCVTVGDGAVGKTCMLICYTSNKFPTDYIPTVFDNFSANVVVDGTTVNLGLWDTAGQEDYNRLRPLSYRGADVFVLAFSLVSRASYENVMKKWLPELQHYAPGVPIVLAGTKLDLREDRHYLVDHPGAVPVTTAQGEELRKHIGATCYIECSSKTQQNVKAVFDAAIKVVIRPPTKQRERKKKKERRGCSIL

SEQ ID NO: 20844 - protein, 412 aa, Zea mays
  VARIANT 81: note = Ancestral polymorphism is R, Derived polymorphism is G
MASHRHFLRLLEDPFSPFPPPPPSSSSCPFLLDGVSDYPSPFPAASPFPDLDDLLLPPAPALDPFLAFTPTPLILRDLTNRVAALEVAVATARRRPGPPATRKRTYVTEAGGRKVKWTSVEKPRAGERTLKWEAEIKSPDDDGFDRKWKWEAKGGSSAASARKLKWGAAVKGKGCLEPWSQAYTWEEDFTASDSDKEEEERAADKNKAKKITMNKNEKKEVKAVKKEKKCPFATVKIEEISEDNDAGCVAIKKAFAKGNGKGKRKELSPQDAALLIQMTYRAHLAHRSQVLRCLRDLAVAKAKLKELRSLFYNISYRHRIAHDHEERQRFSEKIIVLLITVDALEGPDYMVRTAKKSMLEELEAMLEVVDPQPPGKQRSLSRRKFDLPEGGAIPDEKTAAVNKAIRIIEEGK

SEQ ID NO: 20845 - protein, 592 aa, Zea mays
  VARIANT 3: note = Ancestral polymorphism is P, Derived polymorphism is L
  VARIANT 4: note = Ancestral polymorphism is P, Derived polymorphism is L
  VARIANT 16: note = Ancestral polymorphism is A, Derived polymorphism is V
  VARIANT 29: note = Ancestral polymorphism is D, Derived polymorphism is Y
  VARIANT 45..592: note = Derived polymorphism lacks residues 45 to 592
  VARIANT 437: note = Ancestral polymorphism is F, Derived polymorphism is S
MGPPFLAVAVIVAFLAAAAQAADPFAFFDWDVSYITASPLGVPQQVIAVNKQFPGPIMNVTTNYNVVVNVLNSLDEPLLITWDGIQQRKNCWQDGVLGTTCPIPPGWNWTYNFQVKDQIGSFFYFPPLGMQRAAGGFGGITVNNRAVISVPFDTPDGDITLFIGDWYKMNHTHLRKMLDDGKELGMPDGVLMNGKGPYRYNDSLVPDGIEHETIKVEPGKTYRFRVHNVGVSTSLNLRIQNHNMALVETEGSYTMKQNFTNLDIHVGQSYSFLVTMDQNASSDYYIVASARFVNESLWTRVTGVAILQYSNSKGKASGPLPDPPNDEYDKTFSMNQARSIRMNVSTGAARPNPQGSFHYGSINVSQVYKLRNEPPVIINGKKRTTLSGISYSPPDTPLRLADLYDKKDVYTLDFPTMPIDGPPVIRTSVINSTYKNFLEIVFQNNDSTVQTYHIDGYAFWVVGMDYGEWTENSRGTYNKWDGVSRCTTQVFPGAWTAVMLSLDSPGFWNVRTENLDTWYLGQETYIRVVDPNGGYNVTEMVAPDNMLYCGLLKDKQKAQKPHGSRSSASAAKLNYHVLAALVSLVVALVLGH

SEQ ID NO: 20846 - protein, 139 aa, Zea mays
  VARIANT 3: note = Ancestral polymorphism is M, Derived polymorphism is R
MGMSSTQAAAQTQQQQQQLVPPGFRFHPTDEELVDYYLRKKCRLGGPGEEEQNEWYFFSHKDKKYPTGTRTNRATAAGFWKATGRDKPIYANKQRQLVGMRKTLVYYKGRAPNGHKSDWIMHEYRLETNENGPPQARSN

SEQ ID NO: 20847 - protein, 254 aa, Zea mays
  VARIANT 164: note = Ancestral polymorphism is Q, Derived polymorphism is H
  VARIANT 131..254: note = Derived polymorphism lacks residues 131 to 254
  VARIANT 4: note = Ancestral polymorphism is P, Derived polymorphism is L
  VARIANT 2: note = Ancestral polymorphism is E, Derived polymorphism is Q
MENPDLRKAMGMKANQKGVRVRRVEPTAPETGCLQPSDIVLSFDGIDIANDGTVPFRRGERIGFSYLVSQKYTGEKARVKVLPNSNVHEFNIKLAINKRLIPAHIKGRPPSYYIVAGFVFMVVSVPYLRSESAICQYGKDYEYDAPVKLLDKHLHAMAQSSDEQLVVVSQVLVADINIGYEDIVNIQVLAFNGTPVTNLKHLATMVEECNEAFLKFDLDHDQVVVLETKTAKAATQDIVTTHCIPSAVSEDLRS

SEQ ID NO: 20848 - protein, 457 aa, Zea mays
  VARIANT 209: note = Ancestral polymorphism is G, Derived polymorphism is S
  VARIANT 81: note = Ancestral polymorphism is G, Derived polymorphism is S
  VARIANT 25: note = Ancestral polymorphism is D, Derived polymorphism is N
MFDLEERKEKVLHASTVLAQGVGGDFIAPDSLLQEVVNLVEAPVPILGRYDDSFLELPKDVLITVMQKHQKYFAVISKSTGDLLPYFIAVANGAISKEVVRKGNEAVLRARYEDAKFFYKMDTQKKFSEFRGQLSGILFHEKLGTMLDKMTRVENTVAELALILGINERTVPIIKDAAALAMSDLATSIVTEFTSLAGIMARHYALRDSIPEEVVMIFQYGKFGTNLLDSLVGLFGAGCQPSSTNDPFGLRRVSYGLVQILVENKKSFDLRRALTLLAGVQPIAIESDVIDEAVQFVTRRLEQLLVDEGINCEIVRSVLMERANCPYLAAQTATEMEAFSRTETFQKIVEAYSRPTRIIRGKEIESALEVDPHVFEKDEEKVLWSAYLEVADKIHPGVDIKTFVDASLILIQPLEDFFNSVFVMAEDERVRNNRLTLLRKIESLPKGIADLSVLPGF

SEQ ID NO: 20849 - protein, 696 aa, Zea mays
  VARIANT 3..696: note = Derived polymorphism lacks residues 3 to 696
MAEVDHLAAERATARFDVEEMKVAWAGSRHAVHVADRMARLVASDPVFRKDNRTMLSRKELFKDTLRKAAHAWKRIVELRLTGPKITPIYFHPLLHTYSTLSYVIMSRSTEEEADLLRQYVDQPGYVDLHWGMFVPAIKGQGTEEQQHKWLPLAYKFQIIGCYAQTELGHGSNVQGLETTATFDPKTDEFVIHSPTLTSSKWWPGGLGKASTHAVVYARLITEGKDYGIHGFIVQLRSLEDHSPLPGVTLGDIGGKFGSGAYNSMDNGVLRFDHVRIPRDQMLMRLSQVTREGKYVHSNVPKQLLYGTMVYVRQSIVADASKALSRAVCIAVRYSAVRKQFGSQDGGPETQVLNYKTQQSRLFPLLASAYAFRFVGDWLNWLYTDVTQKLEAKDFSTLQEAHACTAGLKAVTTSVTADAIEECRKLCGGHGYLNSSGLPELFAVYVPACTYEGDNVVLLLQVARILMKTVSQLASGKQPVGTMAYMGKVQYLMQCKSAVSSAEDWLNPDAIQEAFEARALRMAIGLLWETGSMTISFPAAAGFYERSPDLLEAAVAHIQLIIVTKFIEKVHQEIPGHGVKEQLQALCNVYALYILHKHLGDFLATGCITPRQGALANEQLGKLYAQVRPNAVALVDAFNYTDHYLGSVLGRYDGDVYPALYEEAWKDPLNETVVPEGYHEYLRPLIKQQQLKLSRL

SEQ ID NO: 20850 - protein, 175 aa, Zea mays
  VARIANT 152..175: note = Derived polymorphism lacks residues 152 to 175
  VARIANT 139..175: note = Derived polymorphism lacks residues 139 to 175
  VARIANT 108: note = Ancestral polymorphism is G, Derived polymorphism is D
  VARIANT 93..175: note = Derived polymorphism lacks residues 93 to 175
  VARIANT 71: note = Ancestral polymorphism is G, Derived polymorphism is D
  VARIANT 63: note = Ancestral polymorphism is A, Derived polymorphism is E
MPPPPLPYLLLLLRTHGQAPSDQTRAALNSKQASDWAGHFLQVFGKALMAGTRWGRWLGLVTAVWVQCISGNNYTFSNYSHALKTLMGLTQLQLNGLSVAKDVGKAFGLLAGLAFDRIPTWLLLAVGSLEGLLGYGAQWMVVSGAVAPLPYWQTRSLWVPNTAASSRRLLLCSKN

SEQ ID NO: 20851 - protein, 91 aa, Zea mays
  VARIANT 4: note = Ancestral polymorphism is L, Derived polymorphism is P
  VARIANT 7: note = Ancestral polymorphism is G, Derived polymorphism is D
  VARIANT 38: note = Ancestral polymorphism is R, Derived polymorphism is H
  VARIANT 63: note = Ancestral polymorphism is A, Derived polymorphism is V
  VARIANT 86: note = Ancestral polymorphism is A, Derived polymorphism is T
MRKLAAGKVRKFSLAAKWCPSLDSSYDHSTLICEAVARRLFPKGSAPELAADLADEYAYRARAALQGGARAAPPRAQAPRGLHLGARVGVS

SEQ ID NO: 20852 - protein, 439 aa, Zea mays
  VARIANT 91..439: note = Derived polymorphism lacks residues 91 to 439
  VARIANT 96..439: note = Derived polymorphism lacks residues 96 to 439
MTAAAKDAVAPTVRPGCQRDEATAGCSTRSHCDRLSSDAAAIDHASSSERRKEGEKDQAKFIGGGVRTHLMPSLASNEPSLLRLHVPRLDRAASRRENGGVEWWRVRGATTSGSESRHQVRFLASRSGRRQEERMASRTSPLVFKRVAGIRTIAESGRFKASSFHFPIIKLLPALITIALPLLVLCWPSRVTVHSSSCKCLGFALRLAAECTILITRTQIPITRGYSVRSKILLLGKFIVYASGSTCQFVSTSVPCANTINWTAPWTTMCVNADYTTPADSVATSEQTGGEAEATLETGGEAAATLEQTGGETEEPTIVAPANEYTEQEAAPQQKCAKIHDFCLGIPFGGLLLSMGLIGFLFWRSPASLTFGVAPGLAILALAVLSLKVWRSGKSSLLFILAQAGIAAAVAWKHGQAYTTTRKLLPWGFYVALRCSFIS

SEQ ID NO: 20853 - protein, 155 aa, Zea mays
  VARIANT 127: note = Ancestral polymorphism is S, Derived polymorphism is T
MASLSSAAITAPSFTAAPARAVVSRRSFTVRASLRKATATAAVAVAASVLLAGGGAMAQEVLLGAGDGGLVFEPSQFTVKAGDTITFKNNAGFPHNVVFDEDEVPSGVDASKISQEEYLNAPGETYSVTLTVPGTYGFYCEPHQGAGMVGKITVN

SEQ ID NO: 20854 - protein, 748 aa, Zea mays
  VARIANT 303: note = Ancestral polymorphism is K, Derived polymorphism is N
MRSVEETKRSLTVAPFECAWGEELRFGEPGRGCITFEASAQNDVTLVFRHQLGSRHYHYKTDTSRHYTVILGSHRNKRLKIEVDGNTAVDVAAVGLCCSSSFQSYWISIYDGYISIGQGKHPSNNLLFQWLDPDPNPHVQYVGLSSWDKHVGYRNISLLPSAPPNSIFWTQIEYANVHPDADARDYVRKDNCGQRVLADFLENWDFSDAVFVVGTERKVVPAHKLVLCASGDFPFEIGDGATIVLPSASYPVLHSLLEYIYTGSTQIAEWLLSSLLELSSQFKVEPLMKCCKEIIDCLEVDKKPSDSGKILIVSKGRLQDHRFDSCPLKAPLNVQKVAEFLANGEHSDINIYVNGHGLVAKGHKLILSLWSVPLAKMFTNGMKESNAADIFFEDVPPKPFFLLLQFMYYGELKLDTGDITSVLVQLLLLADQFAITVLQFECCKRIMEYLSEHGDMTVTSEERVLDVILTWCMGACETFHWTSVDELLRTSTPEQLFGERLSAINTLLPLVRFPLMHLSILKRMERSNLANHIQAFRQLVAEAIEFSHAGQLMPTACECERFQHRRSSYKELQYISDGDSNGVIYYAGTSFGKHQWMNPVLTKNITVVASSPNSRHTDPKALVSKNYQGTCFAGPCVENGKRVSWWMVDIGQEHQLMCNYYTVRQDGSTAFMRSWAFQGSMDGRNWTSLRVHDSDPTVCYPGQFASWPIVGPAALLPFRFFRVALTGPAVGCTWNLCICFLELYGYFH

SEQ ID NO: 20855 - protein, 761 aa, Zea mays
  VARIANT 106..761: note = Derived polymorphism lacks residues 106 to 761
  VARIANT 140..761: note = Derived polymorphism lacks residues 140 to 761
MTCASSPPPPPRAMKRELAFALQSLSEISASPGRTRSGRPISSLPNPLASASPKRRKRSAPLGLASAADLISPPTPPIDAEPPNQPLRDIIQPLHGSNPPTASDHRSDSNADQELIPQTMLEAPQPSHLETAIGCATATEVSAVKVIANPNLPASENSAADDSAMEVIAKPNVATEDGASKLNVAMEDTASKLTVADTAAVEPTLLETTIAAGSTVVAGNEQCDNSNSSGASLQQQAVDNVLMSTAMLAEDAATPVAAAELKPARRFTRLLLKNHEPDKEESAACESQATPDGSKDTSFDFALLLEKPQRRFTRSSLKTKVESSLVGSDDALDSASDARPSVKKMEMKMSKKVACLTKHPGNIRELLNTGLLEGMPVMYIIPHSKVKAVLKGVITGCNIRCFCLSCNGSKAVSSYYFEQHAGSTKKHPADYIYLGNGNSLRDVLRASDRSPLEALEKTIRSSIDPVVKRSHTNCLNCNEPVLPSSQTENVLCQVCLESKQPQDPLTTSYTCNGSSSLTPSSKEALLKNISSGKKGGSAGKVTNKDNRLHKLVFNVLLDGTEVAYYVDGQRKVDGYIKDQRIYCNHCNKVVSLFLSFKLFLQVHRTFYKIINIFCGIFRLAHQHLKLMRVRDQGANRKYDNIFTSNGVSLHELAMKISKDMELSERETDDLCRECGQGGDIFPCKICPRSFHPACVGLSKVPSEWYCDNCRNLVQKEKALAENKNAKAAGRQAGVDSIEQIMKRAIRIVPISDDLGGCALCK

SEQ ID NO: 20856 - protein, 278 aa, Zea mays
  VARIANT 5..278: note = Derived polymorphism lacks residues 5 to 278
  VARIANT 49: note = Ancestral polymorphism is L, Derived polymorphism is S
  VARIANT 50: note = Ancestral polymorphism is G, Derived polymorphism is C
  VARIANT 149..278: note = Derived polymorphism lacks residues 149 to 278
MARIRGSPHCAERTQGEEVKGDVRITSVTPTEDSSTTNKIPTVGVSISSGFVISKLSDDEDDEKLGDADEDAESEKLNQCVDNMSDKPDTPSYRLRSDHRKEKSLGLLTQHFLKLFLTMEVETISLDEAARLLLGEGHAESNMRTKVRRLYDIANVLSSLNFIEKTQQVDTRKPVFRWLGQAKRKQENNAAVALPPFRKAIPNKRAFGTDLTNIDNKQAKLDLVAENKINLMQGASNMVKTFDRQLGQGKGVTLFMGPLSHPVLEGKPNVNLVRGRIR

SEQ ID NO: 20857 - protein, 69 aa, Zea mays
  VARIANT 55: note = Ancestral polymorphism is F, Derived polymorphism is S
  VARIANT 35: note = Ancestral polymorphism is I, Derived polymorphism is T
  VARIANT 25: note = Ancestral polymorphism is A, Derived polymorphism is V
  VARIANT 24: note = Ancestral polymorphism is L, Derived polymorphism is H
MGSGSFLKVLAKNFDVLAGPVISHAYPLYASVRAIETKNPVDDQQWLTYWVLYSFVTLFELTLAPIIEW

SEQ ID NO: 20858 - protein, 387 aa, Zea mays
  VARIANT 21..387: note = Derived polymorphism lacks residues 21 to 387
  VARIANT 139: note = Ancestral polymorphism is C, Derived polymorphism is Y
  VARIANT 142..387: note = Derived polymorphism lacks residues 142 to 387
  VARIANT 296..387: note = Derived polymorphism lacks residues 296 to 387
MFIEPQREAEPDSDKLKQGKKQEMEWKEFTKEPPSAQKSLVKISSRFFSASSPPKLMESLCLHLSFAGSSSEIELRRVDYFSSKELPQVLERIMRKKLRFLSYCICFCPVFLYHYFCTIISDLFTTMTSAPSAFLKPKCALWDCPRPAVGSERWHDYCSMYHADLVVQEEGPLGTMPMIRPRGIDLKDAPCLLLLVQKSKEKNVRIPICEGAATAKSPWNAPELFDLYIFEGVSIREWLFFDKPRRAFVSGNRKQRSLPDYGGRGWHESRKQAMKDFGGLKRSYYMDPQPSNNYEWHLYEYEINECDAFALYRLEFKSSDAKKIVKSKLAYNPLNEIQQQMVRLSADSPVDNKRTARGKPHANPTAVDTNIYSVPNTTAQANVPNAF

SEQ ID NO: 20859 - protein, 266 aa, Zea mays
  VARIANT 24..266: note = Derived polymorphism lacks residues 24 to 266
  VARIANT 26: note = Ancestral polymorphism is R, Derived polymorphism is Q
  VARIANT 27: note = Ancestral polymorphism is Q, Derived polymorphism is R
  VARIANT 30: note = Ancestral polymorphism is P, Derived polymorphism is H
  VARIANT 31: note = Ancestral polymorphism is G, Derived polymorphism is R
  VARIANT 35..266: note = Derived polymorphism lacks residues 35 to 266
  VARIANT 42..266: note = Derived polymorphism lacks residues 42 to 266
  VARIANT 47: note = Ancestral polymorphism is G, Derived polymorphism is R
  VARIANT 61: note = Ancestral polymorphism is G, Derived polymorphism is R
  VARIANT 69..266: note = Derived polymorphism lacks residues 69 to 266
  VARIANT 82: note = Ancestral polymorphism is G, Derived polymorphism is E
  VARIANT 86: note = Ancestral polymorphism is T, Derived polymorphism is K
  VARIANT 96: note = Ancestral polymorphism is D, Derived polymorphism is A
  VARIANT 100: note = Ancestral polymorphism is G, Derived polymorphism is E
  VARIANT 101: note = Ancestral polymorphism is D, Derived polymorphism is Y
  VARIANT 107..266: note = Derived polymorphism lacks residues 107 to 266
  VARIANT 118: note = Ancestral polymorphism is G, Derived polymorphism is C
  VARIANT 131..266: note = Derived polymorphism lacks residues 131 to 266
MAQWHIKEALSVPQCPLLQVQWVQIRQLGPGMIQQMQHPCNECKGSGETISDKDRCPQCKGDKVVSEKKVFEVVVEKGMQNGHKITFPGEADEAPDTATGDIIFVLQQKEHPKFKRKGDDLFYEHTLTLIESLCSFQFVLTHMDNRQMLIKLNHGEVVKPNSFKAINDEGMPMYQRPFIKGKLYIHFSVEFSDSLSPEQCKALEVVLPPKPVSQYTDMELDECEDTMPYDVNIEEEMRRRQQQHQEAYDEDDNVPGGGQRVQCAQQ

SEQ ID NO: 20860 - protein, 198 aa, Zea mays
  VARIANT 13: note = Ancestral polymorphism is T, Derived polymorphism is I
  VARIANT 15: note = Ancestral polymorphism is A, Derived polymorphism is V
  VARIANT 87..198: note = Derived polymorphism lacks residues 87 to 198
  VARIANT 97: note = Ancestral polymorphism is R, Derived polymorphism is G
  VARIANT 102: note = Ancestral polymorphism is R, Derived polymorphism is W
  VARIANT 188: note = Ancestral polymorphism is L, Derived polymorphism is F
MQEEKRSVHTPLIGAVKIKEVLEGHEIWSKVEFSMVSVIFRAIVASAVEPVQHVPRAGSEINVAGPSVGSETNVDGLMLDQEACEVQSPPSVTSVYRSGKKRKKSQVASVLDDYLEHKKKQTQKIMEVLLEKKSREEEYSIERCLDTVDVMEDLTDEEKALAAEVFKNELNREMFVMQKNVNVRLIWLRRKISRIAST

SEQ ID NO: 20861 - protein, 417 aa, Zea mays
  VARIANT 237: note = Ancestral polymorphism is D, Derived polymorphism is V
MAAALAAMVVLALRTVAGAASTPAAAAATTSRSPVIYIFGDSMSDVGNNNYLLLSLAKCNYPWYGIDYKNGYPTGRFTNGRTIGDIMAAKFGSPPPVPFLSLYMTDDEVLGGVNFASGGAGLLNETGIYFVQYLSFDSQISSFEQIKNAMIAKIGKKAAEETINGAIFQIGLGKNVDSDLSPARSTHASKPRSINQLDTARALCFAGSNDYVNNFLRPFMADGIVYTHDEFIGLLMDTIDRQLTRLYKLGARHIWFSGLAPLGCIPSQRVLSDGGGECLDDVNTYAIQFNAAAKDLLEGLNAKLPGARMYLSDCYSIVMELIDHPEKHGFKTSHTSCCDVDTTVGGLCLPTAQLCADRRDFVFWDAYHTSDAANQVIADRLFADMVGSGAVVPRNGTSPPRVVSAPAPAHASPARMP

SEQ ID NO: 20862 - protein, 339 aa, Zea mays
  VARIANT 167: note = Ancestral polymorphism is A, Derived polymorphism is S
  VARIANT 177..339: note = Derived polymorphism lacks residues 177 to 339
  VARIANT 215: note = Ancestral polymorphism is C, Derived polymorphism is S
  VARIANT 262: note = Ancestral polymorphism is G, Derived polymorphism is V
  VARIANT 273: note = Ancestral polymorphism is A, Derived polymorphism is S
  VARIANT 279: note = Ancestral polymorphism is A, Derived polymorphism is S
  VARIANT 294: note = Ancestral polymorphism is W, Derived polymorphism is C
  VARIANT 301: note = Ancestral polymorphism is K, Derived polymorphism is M
MPAAPTLLPPCDAEEPLLAESSDRFSMFPIRFPQIWEFYKKAVASFWTAEEVDLSADARHWDEALSPDERHFISHVLAFFAASDGIVLENLASRFMTDVQVAEARAFYGFQIAIENIHSEMYSLLLETYIRDHVEKDRLFRAIDTVPAVRRKADWAMRWIDGGERFAERIVAFACVEGIFFSGSFCAIFWLKKRGLMPGLTFSNELISRDEGLHCDFACLLYELLRNKLDEARVREIVADAVDIEREFVCDALPVALVGMNGDLMSQYIEFVADRLLMALGCKKMYNVTNPFDWMELISLMGKTNFFEKRVGDYQKASVMNSLNGGGAADHVFSIDEDF

SEQ ID NO: 20863 - protein, 103 aa, Zea mays
  VARIANT 12: note = Ancestral polymorphism is E, Derived polymorphism is Q
  VARIANT 24: note = Ancestral polymorphism is T, Derived polymorphism is I
  VARIANT 34: note = Ancestral polymorphism is C, Derived polymorphism is Y
  VARIANT 39: note = Ancestral polymorphism is V, Derived polymorphism is M
  VARIANT 54: note = Ancestral polymorphism is D, Derived polymorphism is Y
MVYVDSWDEFVERSVQLFRADPNTTRYVMKYRHCEGKLVLKVTDDRECLKFKTDQAQDAKKMEKLNNIFFALMTRGPDADISEVSEKGQAEQQQPKKGRGRRQ

SEQ ID NO: 20864 - protein, 130 aa, Zea mays
  VARIANT 84: note = Ancestral polymorphism is E, Derived polymorphism is G
  VARIANT 50: note = Ancestral polymorphism is C, Derived polymorphism is F
  VARIANT 48: note = Ancestral polymorphism is E, Derived polymorphism is V
  VARIANT 47: note = Ancestral polymorphism is A, Derived polymorphism is T
MLQGTTTAAITTTGRALAAGAEGSNAGSAGRHTTIATLNPAAPPAVAEVFWDPDPYLMVQQLREFETLNDGLVALRVQLQEYAEEISKSKDTNAGMDWLLALPASVRDVVIMARDVIESFFVISTGAAPP

SEQ ID NO: 20865 - protein, 426 aa, Zea mays
  VARIANT 228: note = Ancestral polymorphism is P, Derived polymorphism is L
  VARIANT 299: note = Ancestral polymorphism is E, Derived polymorphism is V
MSRHEGRLKGQGGLGLSTDILDQELLHKAHFFILQSAKDVTKYIDKHKKRLRKKNPEMVDDNIVDLNEKSVAGTFTPLDNMDILATAIGSNHPGRTTGVSAYVGLGMGLAQGDGPLKKKRRTTKEYVKRIVDEYEAKFEKLTALCQRGDEMQVVGADSTGGKCLSVECTDKVGEIAKSHGLKLHIDGARIFNASVALGVPVDRLVKAADSVSVCFGLLVCLSKGLGAPVGSVIVGSKAFIDKARILRKTLGGGMRQVGVLCAAAHVVVRDTVGKLADDHRKAKALAGFLVCLVGFIFLEGLKKIEQITVDLASVETNMVSLLYHLIDPRTFPLLTVIRFGQKGIPYLNTNDGRTIRYPDPLIKANDTIKIDLETNKIMDFIKFDVGNMVMVTGGRNIGCVGVIKNREKHKGSFETIHVMLGAFCYV

SEQ ID NO: 20866 - protein, 94 aa, Zea mays
  VARIANT 66..94: note = Derived polymorphism lacks residues 66 to 94
  VARIANT 64: note = Ancestral polymorphism is K, Derived polymorphism is N
  VARIANT 60: note = Ancestral polymorphism is D, Derived polymorphism is V
  VARIANT 36: note = Ancestral polymorphism is A, Derived polymorphism is G
  VARIANT 2: note = Ancestral polymorphism is E, Derived polymorphism is Q
MQLKKMHQEKQLDTLVDKGLGSKYDRIKLEEMVQVGLLCTQFFPGHRTKMSEVVRMLEGDGLAKRWEASQHTKESHKFKVPNFSFSRCHSESLT

SEQ ID NO: 20867 - protein, 129 aa, Zea mays
  VARIANT 21..129: note = Derived polymorphism lacks residues 21 to 129
  VARIANT 22..129: note = Derived polymorphism lacks residues 22 to 129
  VARIANT 32: note = Ancestral polymorphism is M, Derived polymorphism is K
MSNPVGHYFASASHDTTARIWSIDKIQPLRIMDGHLSDVDCVQWHVNCNYIATGSSDKTVRLWDVQTGECIRMFFGHRSMVLSLAMSPDGRYMASGDEDGTIMIWDLSTGCCVSPLLGHNSCVWTLAFR

SEQ ID NO: 20868 - protein, 170 aa, Zea mays
  VARIANT 133: note = Ancestral polymorphism is S, Derived polymorphism is C
  VARIANT 125: note = Ancestral polymorphism is A, Derived polymorphism is S
MAAVMVSRQGRELQRYSASTGGRVVVGCVPYRVRGGDGEVEVLVISSQKKGPAGGVLIPKGGWELDESMDEAARREAAEEAGVLGETGPALGRWCYRSRSYDATYEGFVLPLRVTAELDRWPEMAARRREWVSAAEAIARCPHPWMREALQRFSDTVAVAAETMHLASAL

SEQ ID NO: 20869 - protein, 142 aa, Zea mays
  VARIANT 3: note = Ancestral polymorphism is M, Derived polymorphism is I
  VARIANT 4: note = Ancestral polymorphism is Q, Derived polymorphism is L
  VARIANT 15: note = Ancestral polymorphism is R, Derived polymorphism is W
  VARIANT 75: note = Ancestral polymorphism is E, Derived polymorphism is K
  VARIANT 110: note = Ancestral polymorphism is M, Derived polymorphism is K
  VARIANT 114: note = Ancestral polymorphism is K, Derived polymorphism is N
  VARIANT 132: note = Ancestral polymorphism is L, Derived polymorphism is P
  VARIANT 136: note = Ancestral polymorphism is L, Derived polymorphism is V
MPMQIIFGSGVATCRFAMGSDEPLGKPNDIADILDDSIEVTLEFVDGSNLTGKGKTIDKGTPGDSNDSKPMSNLEKRKSIHAEPAPGIYNAAINCPGLSREALMYAKNHKMQHNATSLVFLDMTPNDRDLWLKTFLAKHYHI

SEQ ID NO: 20870 - protein, 291 aa, Zea mays
  VARIANT 166: note = Ancestral polymorphism is L, Derived polymorphism is F
  VARIANT 143: note = Ancestral polymorphism is M, Derived polymorphism is I
MIINRYGLRSDVRSVHLSGMGCSAGLISVGLARNLLQVAPEGTHALVVSTETITPNYYVGSERAMLLPNCLFRIGGAAALLSNSPAKARFRLKHVVRTLTGAQDNAYTCVFQQEDDSGNVGINLNKDLMTIAGNALKANITAMGPLVLPASEQLLFALSFIARKVLSGKFKPYIPDFRTAFDHFCIHAGGRAVIDELQRSLKLSDEQVEASRMALHRFGNTSSSSLWYELAYIEAKGRMRRGDRVWMIGFGSGFKCNSAAWECIAPAADAQGPWATSIHRYPVDIPDVLKH

SEQ ID NO: 20871 - protein, 355 aa, Zea mays
  VARIANT 12: note = Ancestral polymorphism is A, Derived polymorphism is T
  VARIANT 34..355: note = Derived polymorphism lacks residues 34 to 355
  VARIANT 100..355: note = Derived polymorphism lacks residues 100 to 355
  VARIANT 132: note = Ancestral polymorphism is S, Derived polymorphism is Y
  VARIANT 158..355: note = Derived polymorphism lacks residues 158 to 355
  VARIANT 173..355: note = Derived polymorphism lacks residues 173 to 355
  VARIANT 226..355: note = Derived polymorphism lacks residues 226 to 355
  VARIANT 257..355: note = Derived polymorphism lacks residues 257 to 355
MSVLLFKHQKIALAWMLSKENCSHCRGGILADDQGVGKTISTIALIQKEMVKQSRFMTAGSYSTKFVPNSDYDNGSDVVISMDKKEPKDEPLNELDGSARLHVASSLKLCDSKPNTATDKAEPKKKTRVRYSASNLRSKTRPAAGTVVVCPASVLRQWANELSVKVMEDNKLSVLVYHGSSRTRDPNELATCDVVVTTYMTVANEVPKENSNDERKKCEMDGICLEISIGSKRKKQSKPKKKNKPSNSEGGPLARVRWFRVVLDEAQTIKNYRTKVSRACCGLRAQRRWCLSGTPIQNKIDGLYSYFCFLKYEPYSKFSNFKYMIKHQITRDLVCGYKKLQAILKIIVLRRTKGK

SEQ ID NO: 20872 - protein, 594 aa, Zea mays
  VARIANT 173..594: note = Derived polymorphism lacks residues 173 to 594
MAMEEAGKMTCRKKGGLRTMPFIFANEVAEKLAVVGFSTNMLTYLTTQLHMPLAKAATTLTNFGGTSAATPLIGAFLADACIGRFWTIAAASVVYQAGMALLTVSAALPRFRPAPCKPGGAVACQEAAPWQLAVLYVSLLLNAVGAGGYRPCIVAFGADQFDESRAAERARSWGFFNWYYFCNGASMLLAVTAVVYVQDNVGWGWGLGVPAFCMGVSVAAFVAGYPMYRRLEPAGSPFTRLAQVVVAAVKKRRLPAADVDPALLYEDDELDAPISMYGKLVHTDQLSFFDRAAIVTDGDLVTLTDADSGKPSTAPVPDLWRLSTVHRVEELKSVIRMGPIWAAGILVITGSSTQNTFSLQQASTMDRRLAPGLSTFEIPAGSMTVFGLLAMLFTLFVYDRALIRVARRFTGLDRGISFLHRMGVGFAISVLATLVAGFVERHRRDAAAAAGATDAGTSPLSAYWLVPQYALHGVAEAFTSVGHLEFMYDQAPESMRSTATALFWLSISLGSYASTLLVDAVHRWSAGPGGANWLPDNINHGKLDYFYWVVTVLQVMNLVYYAICAKRFTFKPVQLHKKEEEEGGKALVELQEKV

SEQ ID NO: 20873 - protein, 73 aa, Zea mays
  VARIANT 9: note = Ancestral polymorphism is V, Derived polymorphism is M
MMEKLNEIVFDILEKVADTKQKWKKGIFTKQGGYKEQKMIVSPIVSMSASSKVSEKEKMECNSNFGGRTSVET

SEQ ID NO: 20874 - protein, 654 aa, Zea mays
  VARIANT 177..654: note = Derived polymorphism lacks residues 177 to 654
MDSFYYYQPPNCGTWPYHDISHSYEFHCCCNQAYLPDYYIFRPPFPQELPPPHIYYHVPSPHHPNACPSYFVPSHPYPFDQTPYGYEKFKSHCCGCPTHVCPGAEKNNVKIEEQRPDVKLESGDHKNADSDSIIQHPNKKYPFIWLPLGNMKGKENGEHYELSPQVLNEWAPVSGKWLGDVKQQGQDNEKGKQFQWPIVWMPAGYDAPNQKAKEMNDTEETPKSPKISEVSPQSPKIIHLSWFGNGHHHDQKSDARNAVPKSIHDGKKPPRENCKTIPVVPKKEINEKKKASTYRTIPVIKESDEKKIGMREKRESKEANSAEMVEENRKTKHNDSSVVKHSKLPPVCLRVDPLPRKKPGNGSSRSPSPPRKDTDNTKKDVEELRPRARSWSLNSLVQEEEAPTSKDGQKVQAASTTVGDQQNAALKSIEEDHVQENAGAGSLNGCDKRKNEDGTVIESETAKDDARTYGVNLSESDAAVRIQSAYRGYDVRKWQPLDKLWKIKHVHEQMQVVRKQIQCLLDSCSKPTQKEQVAIGETIMNLLLKLDAIKGLHPSVREARKSVAQELICLQEKLDTLCKAASGDMNHTDSNDDESEGTKNIIQTVAPTVITEASDRKRTFELGKVQEPCSVDSIEPCNTVPSGVSWEVRPECQM

SEQ ID NO: 20875 - protein, 600 aa, Zea mays
  VARIANT 84: note = Ancestral polymorphism is H, Derived polymorphism is Y
MFTIVNRGNKPLGFREVKTTPLSQGGKAKLIRLRPPHGSGNLGANPANSCPLTPLGFLERAATVFSDCPSVVYHDTVFTWFQTHRRCLRLASALVSLGITRGDVVSVLLPNVPAMYEMQFGVPMSGAVLNNINTRLDARTVAVLLHHSGSKLVFVDPSSLQLIGDALRLLPPGHPIPHVIPVEDPHEEFPAAPADTLTYERLLDKGDPEFVWVQPESEWDPMVINYTSGTTSEPKGVVHCHRGTFLITVDSLIEWSVPPRPTYLWTLPMFHANGWSYPWGMAVVGGTNVCLRRVNAATVYAAIASRGVTHLCCAPVVLNMLANAPEGVRRPLPGKVHVRTAGSPPPAAVLQRTEAIGFEVSHGYGLTETAGLPVSCTWKGEWDSLPASERARLKARQGVRTPATGKVDIMDSETGCSVPRDGSTMGEIVLRGGCVMLGYLDDNAATKAAIREDGWFYTGDVGVMHPDGYLEIRDRSKDVIINAGENISSVEVESVLYSHPAVNEAAVVARPDELRGETPCAFVSVKDYAAGTVTAADITAWCRERMPQYMVPRTVVFHTELPKTSTGKIQKYVLRNLAMEMGPARKADGATANGSRRQQQ

SEQ ID NO: 20876 - protein, 142 aa, Zea mays
  VARIANT 34: note = Ancestral polymorphism is A, Derived polymorphism is V
MAARGRGSAGSSSRAPSVAGTALLCVAVAVLLLAATPAAVAGTTYLVGDAAGWTLKVDYGRWVAGKTFHAGDILVFKYNTTWHDVAWVSKGGYRNCIVSPKGRAPVYHTGYDAVTLPRGTHYFICAMPGHCSAGMKLAVTVY

SEQ ID NO: 20877 - protein, 113 aa, Zea mays
  VARIANT 2: note = Ancestral polymorphism is A, Derived polymorphism is V
MVTKVICFLVLASVLLAVAFPSALRQQVKKGGGGEGGGGGSVSGSGGGNLNPWECSPKCGSRCSKTQYRKACLTLCNKCCAKCLCVPPGFYGNKGACPCYNNWKTKEGGPKCP

SEQ ID NO: 20878 - protein, 83 aa, Zea mays
  VARIANT 66..83: note = Derived polymorphism lacks residues 66 to 83
  VARIANT 64: note = Ancestral polymorphism is G, Derived polymorphism is R
  VARIANT 53: note = Ancestral polymorphism is G, Derived polymorphism is S
  VARIANT 51: note = Ancestral polymorphism is A, Derived polymorphism is V
  VARIANT 43: note = Ancestral polymorphism is S, Derived polymorphism is F
  VARIANT 14: note = Ancestral polymorphism is A, Derived polymorphism is V
  VARIANT 11: note = Ancestral polymorphism is R, Derived polymorphism is C
  VARIANT 1: note = Ancestral polymorphism is M, Derived polymorphism is T
MASSRLTYPERFYAAAAYAPHRDKAIIGSPSPSLLWDEPFLSSVTATDATAGGMGQLCQMCSFRGWIIPRSTDKSLCYLCEEI

SEQ ID NO: 20879 - protein, 46 aa, Zea mays
  VARIANT 21: note = Ancestral polymorphism is L, Derived polymorphism is P
  VARIANT 29: note = Ancestral polymorphism is A, Derived polymorphism is T
MPRLFICQTLIAEFLFQSELLAAEINYMAKRETELQNDHMNLRTKV

SEQ ID NO: 20880 - protein, 148 aa, Zea mays
  VARIANT 39: note = Ancestral polymorphism is R, Derived polymorphism is Q
  VARIANT 44: note = Ancestral polymorphism is M, Derived polymorphism is I
  VARIANT 46: note = Ancestral polymorphism is P, Derived polymorphism is L
  VARIANT 60..148: note = Derived polymorphism lacks residues 60 to 148
  VARIANT 130: note = Ancestral polymorphism is P, Derived polymorphism is L
MGLGLGISLPAASANSNGTAEQNSCFSKQDAMPSAFRARKCLQMSPVTCASVSILMLLFWGSEFPLNLPSLLLMVCLVNAGAYQSSQGNCSENDPNNTTVFVGGLDSNVDEEYLRQIFTPYGEISYVRIPVGKHCRFVQFTSRLTSNA

SEQ ID NO: 20881 - protein, 586 aa, Zea mays
  VARIANT 315: note = Ancestral polymorphism is G, Derived polymorphism is R
  VARIANT 436: note = Ancestral polymorphism is N, Derived polymorphism is K
MARRAASSLVSRCLLARAPAGAPPAAPSAPRRTVPADGMHRLLPGVLQRFSTAAAVEEPITPSVHVNYTKLLINGNFVDSASGKTFPTLDPRTGEVIAHVAEGDAEDINRAVAAARKAFDEGPWPKMTAYVNTQLEILVSAVSSWPEAMLTDGWNLTLQERSRILLRFADLIEKHNDELAALETWDNGKPYEQAAQIEVPMVARLMRYYAGWADKIHGLIVPADGPHHVQILHEPIGVAGQIIPWNFPLLMYAWKVGPALACGNTLVLKTAEQTPLSALYISKLLHEAGLPEGVVNVVSGFGPTAENGLKNYTFGLNIYFFPSIKIAFTGSTDTGKIILELAAKSNLKTVTLELGGKSPFIIMDDADVDHAVELAHFALFFNQGQCCCAGSRTFVHERVYDEFVEKAKARALKRVVGDPFRKGVEQGPQIDDEQFNKILRYIRYGVDGGATLVTGGDRLGDKGFYIQPTIFSDVQDGMKIAQEEIFGPVQSILKFKDLNEVIKRANASQYGLAAGVFTNSLDTANTLTRALRAGTVWVNCFDVFDAAIPFGGYKMSGIGREKGVDSLKNYLQVKAVVTPIKNAAWL

SEQ ID NO: 20882 - protein, 329 aa, Zea mays
  VARIANT 289..329: note = Derived polymorphism lacks residues 289 to 329
  VARIANT 284: note = Ancestral polymorphism is D, Derived polymorphism is Y
  VARIANT 264: note = Ancestral polymorphism is G, Derived polymorphism is D
  VARIANT 257..329: note = Derived polymorphism lacks residues 257 to 329
  VARIANT 241..329: note = Derived polymorphism lacks residues 241 to 329
  VARIANT 119..329: note = Derived polymorphism lacks residues 119 to 329
  VARIANT 85: note = Ancestral polymorphism is S, Derived polymorphism is Y
MATLKASILAMLGFAFFCGAALAARDLSDDSAMVARHEQWMAQYRAASTKTPPRRLGGSRCSRLTLSSSSRSTLFADLTNHEFRSIKTNKGFKSSNMRIPTGFRYENVSADALPTTIDWRTKGAVTPIKDQGQCGCCWAFSAVAATEGIVKISTGKLVSLAEQELVDCDVHDEDQGCEGGLMDDAFKFIIKNGGLTTESSYPYTAADGKCKSGSNSAATIKGYEDVPANDEAALMKAVANQPVSVAVDGGDMTFQFYSGGVMTGSCGTDLDHGIAAIGYGKTSDGTKYWLMKNSWGTTWGENGYLRMEKDISDKRGMCGLAMEPSYPTK

SEQ ID NO: 20883 - protein, 314 aa, Zea mays
  VARIANT 249: note = Ancestral polymorphism is G, Derived polymorphism is D
  VARIANT 274..314: note = Derived polymorphism lacks residues 274 to 314
MATLKASILAILGFAFFCGAALAARDLSDDSAMVARHEQWMAQYSRVYKDASEKARRFKFADLTNHEFRSVKTNKGFKSSNMKILTGFRYENVSADALPTTIDWRTKGVVTPIKDQGQCGCCSAFSAVAATEGIVKISTGKLVSLADQELVDCDVHGEDQGCEGGLMDDAFKFIIKNGGLTTESSYPYTAADGKCNSGSNSAATIKGYEDVPANDEAALMKAMANQPVSVAVDGGDMTFRFYSGGVMTGSCGTDLDHGIAAIGYGKTSDGTKYWLMKNSWGTTWGENGYLRMEKDISDKRGMCGLAMEPSYPTK

SEQ ID NO: 20884 - protein, 340 aa, Zea mays
  VARIANT 80..340: note = Derived polymorphism lacks residues 80 to 340
  VARIANT 85..340: note = Derived polymorphism lacks residues 85 to 340
  VARIANT 130..340: note = Derived polymorphism lacks residues 130 to 340
  VARIANT 149..340: note = Derived polymorphism lacks residues 149 to 340
  VARIANT 266..340: note = Derived polymorphism lacks residues 266 to 340
  VARIANT 298: note = Ancestral polymorphism is K, Derived polymorphism is T
MATLKASILAILGFAFFCGAALAARDLSDDSAMVARHEQWMAQYSRVYKDASEKARRFEVFKANVKFIESFNAGGNNKFWLGVNQFADLTNDEFRSIKTNKGFKSSNMKIPTGFRYENVSVDALPTTIDWRTKGAVTPIKDQGQCGCCWAFSAVAATEGIVKISTGKLVSLAEQELVDCDVHGEDQGCEGGLMDDAFKFIINNGGLTTESSYPYTAADGKCKSGSNSAATIKGYEDVPANDEAALMKAVANQPVSVAVDGGDMTFQFYSSGVMTGSCGTDLDHGIAAIGYGKTSDGTKYWLMKNSWGTTWGENGYLRMEKDISDKRGMCGLAMEPSYPTE

SEQ ID NO: 20885 - protein, 123 aa, Zea mays
  VARIANT 8: note = Ancestral polymorphism is S, Derived polymorphism is N
  VARIANT 26: note = Ancestral polymorphism is V, Derived polymorphism is M
MDDSSLTSLSSWKMPLDRCYWALSVVVATEGIVKITMGKLVSLAEQELVDCDVHGEDQGCEGGLMDNAFKFIIKNDGLTIESSYPYTAADGMCKSASNSAATIKGYEDVPANDEAALMKAVAN

SEQ ID NO: 20886 - protein, 340 aa, Zea mays
  VARIANT 42: note = Ancestral polymorphism is A, Derived polymorphism is V
  VARIANT 170: note = Ancestral polymorphism is S, Derived polymorphism is F
  VARIANT 192..340: note = Derived polymorphism lacks residues 192 to 340
  VARIANT 317: note = Ancestral polymorphism is R, Derived polymorphism is G
MATLKASISAIIGFAFFCGAAMAARDLSDDSVMVARHEQWMAQYSRVYKDASEKARRFEVFKANVQFIESFNAGGNNKFWLGVNQFADLTNDEFRSTKTNKGLKSSNMKIPTGFRYENVSADALPTTIDWRTKGAVTPIKDQGQCGCCWAFSAVAATEGIVKISTGKLVSLAEQELVDCDVHGEDQGCEGGLMDDAFKFIIKNGGLTTESSYPYTAADGKCKSGSNSAATIKGYEDVPANDEAALMKAVANQPVSVAVDGGDMTFQFYSGGVMTGSCGTDLDHGIAAIGYGKTSDGTKYWLMKNSWGTTWGENGYLRMEKDISDKRGMCGLAMEPSYPTE

SEQ ID NO: 20887 - protein, 114 aa, Zea mays
  VARIANT 105: note = Ancestral polymorphism is S, Derived polymorphism is T
  VARIANT 76: note = Ancestral polymorphism is G, Derived polymorphism is R
  VARIANT 60..114: note = Derived polymorphism lacks residues 60 to 114
  VARIANT 58: note = Ancestral polymorphism is A, Derived polymorphism is V
  VARIANT 50..114: note = Derived polymorphism lacks residues 50 to 114
MIELFIIYQWIAICCIFFQQHPTLSIYGALFTIGHGAHHDFRLGESSTASPVCRLKQAKRGALLEVFEPKVVRVNGKSLDKAAKITLNGGDEIIFRSPVRHAYVSFSIVYFFIY

SEQ ID NO: 20888 - protein, 253 aa, Zea mays
  VARIANT 165..253: note = Derived polymorphism lacks residues 165 to 253
  VARIANT 102..253: note = Derived polymorphism lacks residues 102 to 253
  VARIANT 101..253: note = Derived polymorphism lacks residues 101 to 253
  VARIANT 77: note = Ancestral polymorphism is L, Derived polymorphism is P
  VARIANT 75: note = Ancestral polymorphism is I, Derived polymorphism is N
  VARIANT 73: note = Ancestral polymorphism is E, Derived polymorphism is K
  VARIANT 57..253: note = Derived polymorphism lacks residues 57 to 253
  VARIANT 56: note = Ancestral polymorphism is A, Derived polymorphism is V
  VARIANT 54: note = Ancestral polymorphism is R, Derived polymorphism is S
  VARIANT 31: note = Ancestral polymorphism is A, Derived polymorphism is S
MCSQMDRYIKYHVQEFDRAFRERFPACTLAAKRHIDSTTTILDVQGVGFKNFSRTARELVNRMQKIDSDYYPEVIILFEGVLGSNYQSRLLEVIDSSELPELLGGSCTCSDKGGCLGSNKGPWNDPYILKLIHNLEAGCMRETTKPVSEGGERSSSSFRLEQMKWQGMLSDISNAESGSDVDDFGPSFVHKVSGYGCLTPVREEVKGTDCATYLSCDDQSHPDMVPEFYHGVQRTTEMVQKQMADFRQYSTNR

SEQ ID NO: 20889 - protein, 395 aa, Zea mays
  VARIANT 218: note = Ancestral polymorphism is Y, Derived polymorphism is H
  VARIANT 65: note = Ancestral polymorphism is W, Derived polymorphism is S
MKNFHEIKLPYSTRCAILAAVLLVTTCLMILAFVILPDREMLPPPLVSDDHGGGNLSCNIFKGEWVPDPGAPRYTTETCPVIHGHYDCMRYGRPDLGFVRWRWRPEGCELPRFDAARFLRATRGKSMAFVGDSLARNQMHSLVCLLARAEQPAPWTNASYVFRFERHGFTVSLFWSPFLVRAVETDPDGPTRSGAGLWSLHLDEPDAGWAAHATEFDYVVVSAGSWFFRPSMFHVHGRLVGCNGCLAPNVTDLTLRYSLRMAFRTALRAAVDAPGIGKRSRRTVVVRTLSPSHYENGDCARARPLRRGEWEMNAVEKDMYAIQAEEFGAARRVSNGARMLLLDATEAMALRPDAHPSKYRLWQPDRFNVSRDCLHWCLPGTMDACNDMLLHMLLH

SEQ ID NO: 20890 - protein, 434 aa, Zea mays
  VARIANT 67: note = Ancestral polymorphism is S, Derived polymorphism is P
  VARIANT 233: note = Ancestral polymorphism is H, Derived polymorphism is Y
  VARIANT 289..434: note = Derived polymorphism lacks residues 289 to 434
  VARIANT 371: note = Ancestral polymorphism is R, Derived polymorphism is M
MRRIRSHCTTPRHLTPTMIHSIRGFLTGARRSRHTTPKIKYVRALAAVLFAGATLSVLFLGPLQWWSPFSASTFSSVAAACDLTRGQWVRDPAARPYYTNATCAFIEGYQNCMKHGKPSMEFLRWRWQPDGGELERFDAARFFGLVRGRSILFVGDSLASSHVRSLVCALWQVESPSRSRSEGFEYWRFPAHVFTVAFFWTPFQVRWRLTRGPPEAVGPDLQGEVFAGPSDLHVNEPDERWMPAAKDHDYVVLSASHWFERPAVYYSGGRVVGCHGCGMANVTALKPQYAQRAALRTVLRALAGMKGFKGTAILRTVAPTHYGNGGWFDGGECTATEPADPEEPLEMKEPDGDFYEAQLEEFAAAEEDARRNGVRMRMMDVTKMMLRRPDGHPDRYGHGQGEHEGFDIDCLHWCLPGPIDVWNELLLQILAGHY

SEQ ID NO: 20891 - protein, 45 aa, Zea mays
  VARIANT 23..45: note = Derived polymorphism lacks residues 23 to 45
  VARIANT 29..45: note = Derived polymorphism lacks residues 29 to 45
MEASAPRSTASGRWCPAPSSTPSLSVPQRFRPRPPLPLQHVQTQQ

SEQ ID NO: 20892 - protein, 1064 aa, Zea mays
  VARIANT 811..1064: note = Derived polymorphism lacks residues 811 to 1064
  VARIANT 726..1064: note = Derived polymorphism lacks residues 726 to 1064
  VARIANT 17..1064: note = Derived polymorphism lacks residues 17 to 1064
MRFHESRELKEAGSADWWRLHEASLFALGSLSEQLIWSCPYKSYNQQRDLVWFTTDILPTNFCTFCSFLSKSCVECCIIFRFPFFMSGLAFSSFCCSFTICYLAAVLLKQFIKQHWQEDEENFVPPVVSASEKVVIRQLLLTSLDDSNGKIRTAISMAVAAIGQQDWPEDWPELLPVLLKLIGDQSNGNEVRGALRCLALLSDDLDDMCVPKLVPELFPSLYRIISSPHLYENSLRAKAFAIVHSCISMLGSMSGVYKRDTASLMTSVLDPLIEQFSIVLNYPVQSQNPDDWSMQMEVLKSILPALWQTFVSSFKTYHLSYIQGAETLDSISYDSDGSEKSLESFEIQLFELWTTIVGNSRLAKVIGGNIKELAYYTIALQQITEEQVQNWSRDANQYVADEDDLTYSCRVSGSLLLEELVTAYEDYGIDSIVEASQMRFHESRELKEAGSADWWRLHEASLFALGSLSEQLCEAQDSGLTKYNVRDLLEQMLIDIMGTGVHQYPFLHARAFSSVAKFSSLISKGVSEQYLCNAAHAIASDVPPPVKVGACRALAQLLPESNQNLIQPNIMGILSSLVDLLRQHVCVSTLKDVICTGIDTKILWCFFSSDNVGGEQSTLIEPVISPIILDVWAQHIADPFISIDAVEVLEAIKNAPGCLQPLVSRILPTIGSILVKPKVQPDGLVAGSLDLLTMVLKNAPVAVVKAVFDTCFVSTVQIVLESDDHGEMQNATECLAAFISGGRQELLVWGGEQGQTLKMLLDAASRLLDPALESSVSLFVGSFVLQLILQIPLHLSPHIPDLIAAIMRRMQTSSIAGLKSSLIVIIARLVHMSAPNVDGFINLLLSIPAQGYDNSLVYIMSEWSQLQGKCEIQGAYQIKVTTTALALLISTRHPELSKVEVQGHLIKTSAGITTRSKARVTPDQWTKIPLPVKIFSLLADTLTEIQEQIGAGDDDDSEEDNDWEEVQNGDASISDDIIHSASVPSMTNPSVEHLNAMAKVFDEDDDDSYDDDLTKNDPLNEVKLADFLTNIFANLWENNRPIFEYLCQGLSDSQRSAVEKVLRR

SEQ ID NO: 20893 - protein, 728 aa, Zea mays
  VARIANT 387: note = Ancestral polymorphism is M, Derived polymorphism is T
MEAAPPTSPPSLVLLLLLLLLIISPPSSAFLSPKGVNPEVQALMTIKSMLKDPRGVLKNWDQDSVDPCSWTTVSCSPENFVTGLEVPGQNLSGLLSPSIGNLTNLETVLMQNNNITGPIPAEIGKLTKLKTLDLSSNHLYGGIPASVGHLESLQYLRLNNNTLSGPFPSASANLSQLVFLDLSYNNLSGPIPGSLARTFNIVGNPLICGTNTEEDCYGTAPMPMSYKLNSSQGAPPLAKSKSHKFVAVAFGAAIGCISILSLAAGFLFWWRHRRNRQILFDVDDQHMENVGLGNVKRFQFRELQAATDKFSGKNLLGKGGFGFVYRGQLPDGTLVAVKRLKDGNVAGGEAQFQTEVEMISLALHRNLLRLYGFCTTATERLLVYPYMSNGSVASRLKGKLFSQDSNVLNNIKPTCGSAEQILSSSSSFSMPKKNGVKLEVVTRQAELGKQLELDSSTPLFFLVHWTNAGTAQKQAYDSCQGRPSLYSAIIITAGKPPLDWATRRRIALGAGRGLLYLHEQCDPKIIHRDVKAANVLLDDCCEAIVGDFGLAKLLDHRDSHVTTAVRGTVGHIAPEYLSTGQSSDKTDVFGFGILLLELVTGQTALEFGKAANQKKGAMLDWVKKMHQEKKLDVLVDKGLRSRYDGIEMEEMVQVALLCTQYLPGHRPKMSEVVRMLEGDGLAERWQASQRADSHKSFKVPDFTFSRCYSDLTDDSSLLVQAVELSGPR

SEQ ID NO: 20894 - protein, 199 aa, Zea mays
  VARIANT 27: note = Ancestral polymorphism is D, Derived polymorphism is N
  VARIANT 29: note = Ancestral polymorphism is N, Derived polymorphism is H
  VARIANT 35: note = Ancestral polymorphism is L, Derived polymorphism is R
  VARIANT 57: note = Ancestral polymorphism is V, Derived polymorphism is A
MEAPPSSPFLVLLLLFFPSSGLAAPMDFNHEVQVLMVIKSLLKDPYGALRNWDRNSVDPCTWSFISCSPENLVTALEAPSKNLSGRLSPSIGNLTKLEKLQLQNNNIIGPIPAEIGKLAKLRTLVLSSNKLHGTVPNSLGRLGRLQYIDLSYNNLSGPIPKTSARTLNIAGNPLICAAEQDCDSTKLKPMLDSYIAGEQ

SEQ ID NO: 20895 - protein, 92 aa, Zea mays
  VARIANT 33: note = Ancestral polymorphism is P, Derived polymorphism is L
MPQIPPPASTSAGDAAGGDTIFFVGTTAGVCGPIRPVEHMARWSTAAVCATGGAAITSVGAGEGAGAGGTSPRFKIRTSSMTRRRLGFSLDL

SEQ ID NO: 20896 - protein, 142 aa, Zea mays
  VARIANT 54: note = Ancestral polymorphism is T, Derived polymorphism is K
  VARIANT 34: note = Ancestral polymorphism is E, Derived polymorphism is D
  VARIANT 33..142: note = Derived polymorphism lacks residues 33 to 142
  VARIANT 24: note = Ancestral polymorphism is G, Derived polymorphism is V
MSRLDSRKASLDLANSDIPTAQQVLLTLLAKFWEKGLDATDMVALVDIYASSHTIGFARCDNFRDRIYGVFEMTTSKYSPSSKAYLDRLKEVCPREGDDDDNVSAMDSHTSAVFDNTYFKTIVKGEGLRPWLRPGHVCQHSS

SEQ ID NO: 20897 - protein, 176 aa, Zea mays
  VARIANT 31..176: note = Derived polymorphism lacks residues 31 to 176
  VARIANT 40..176: note = Derived polymorphism lacks residues 40 to 176
  VARIANT 151: note = Ancestral polymorphism is T, Derived polymorphism is M
MNSSSEGNSGSAAEVGCVGEVVKHERFADDWFFLICKGQQRFRVARVVRTKPYLVAAVHWLEDRPPAKPPAHEEDAEALATDVEALMRDVIHITNRLNGKPEKEVEDLRRGLFLTPFSFYVGNTFEGAPREQQALLELEDTAARLRRERDTLRNTLNYLTTASAVKDAFPSSPSSG

SEQ ID NO: 20898 - protein, 127 aa, Zea mays
  VARIANT 4: note = Ancestral polymorphism is P, Derived polymorphism is L
  VARIANT 5: note = Ancestral polymorphism is A, Derived polymorphism is T
  VARIANT 12: note = Ancestral polymorphism is E, Derived polymorphism is D
  VARIANT 34: note = Ancestral polymorphism is T, Derived polymorphism is M
  VARIANT 73: note = Ancestral polymorphism is N, Derived polymorphism is K
  VARIANT 74: note = Ancestral polymorphism is D, Derived polymorphism is N
  VARIANT 75: note = Ancestral polymorphism is G, Derived polymorphism is E
  VARIANT 87: note = Ancestral polymorphism is A, Derived polymorphism is V
  VARIANT 88..127: note = Derived polymorphism lacks residues 88 to 127
  VARIANT 100: note = Ancestral polymorphism is G, Derived polymorphism is D
  VARIANT 107: note = Ancestral polymorphism is A, Derived polymorphism is V
  VARIANT 108: note = Ancestral polymorphism is Y, Derived polymorphism is C
  VARIANT 109: note = Ancestral polymorphism is R, Derived polymorphism is Q
  VARIANT 114: note = Ancestral polymorphism is K, Derived polymorphism is M
  VARIANT 118: note = Ancestral polymorphism is C, Derived polymorphism is F
  VARIANT 121: note = Ancestral polymorphism is D, Derived polymorphism is N
MLLPAIFFLQPEKRHVYYKVHKCVSGGGKVLIPMFALGRAQNLKLQGNCKCSLLILLTGGITGQISWRVNSRNDGPMEKYLDGEIKVQKKALSAQGLKCGGTVQQRAYRLFLLKVLECYTDKCTPSY

SEQ ID NO: 20899 - protein, 579 aa, Zea mays
  VARIANT 512..579: note = Derived polymorphism lacks residues 512 to 579
MGGGAVNDHFPGASDPLLPTKRDGDGDEDDAGASAFHEFDGASFAGAVFNLSTTIVGAGIMALPATMKVLGLVPGLVMIVLAALLTDASIELLVRFSRAAGARSYSAAMADAFGWWGRRLLQVCVVINNVGVMIVYMIIIGDVLSGSTSGGEHHYGVLEGWFGIHWWNGRLFVLLVTTLCVFTPLACLKRIDSLSYTSTISVALAVVFVIITAGIAVIKLIGGQIPMPKLFPTVSDLASVWELFTAVPVLVTAYVCHYNVHPIHNELKDSTQIKPIVHTSLTLCSTIYITTSFFGYLLFGESTLSDVLSNFDSNLGIPYSSVLNDAVRVSYAVHLMLVFPMIFHALRLNLDGLLFASARPLSSDNRRFGIITASLLLVIFGSAIFIPSIWDAFQFTGATAAVCIAFIFPAAITLRDSQGIAKKWDKILAIFMIVLAVVSNVVAVYSDAYKIFNKESAPSNAWIGESTENRSSWWLVDTYDLYVIVHMMLHELGMSVEKVPKIGGGYNYQPKQPFIRYWNVDLWQKLFSNDSVVAALQSLRGVFLGYMCSNRELVGKLIELLAKQKASYTVAMSCDSPNV

SEQ ID NO: 20900 - protein, 169 aa, Zea mays
  VARIANT 123..169: note = Derived polymorphism lacks residues 123 to 169
  VARIANT 116: note = Ancestral polymorphism is R, Derived polymorphism is C
  VARIANT 99: note = Ancestral polymorphism is W, Derived polymorphism is G
  VARIANT 67..169: note = Derived polymorphism lacks residues 67 to 169
  VARIANT 51: note = Ancestral polymorphism is S, Derived polymorphism is N
  VARIANT 39..169: note = Derived polymorphism lacks residues 39 to 169
  VARIANT 27: note = Ancestral polymorphism is R, Derived polymorphism is H
  VARIANT 24..169: note = Derived polymorphism lacks residues 24 to 169
  VARIANT 12..169: note = Derived polymorphism lacks residues 12 to 169
MLAVEVNALCEQAKEILMEEWKVQPVRCPVTVCGDIHGQFYDPIELFHIGSNASNTNHHFMCDYIGQSLPSSHEEPYADRGRSSLSPVQLYVKATSVPWETSWRRAACSRSKSSRRDCGSIARGPTGASRTAAPPWPTLRACTCSGRGSHPLPHTTHFMLKYTWVASSF

SEQ ID NO: 20901 - protein, 462 aa, Zea mays
  VARIANT 396: note = Ancestral polymorphism is C, Derived polymorphism is Y
  VARIANT 395: note = Ancestral polymorphism is D, Derived polymorphism is H
  VARIANT 376: note = Ancestral polymorphism is I, Derived polymorphism is T
  VARIANT 361: note = Ancestral polymorphism is S, Derived polymorphism is I
  VARIANT 360: note = Ancestral polymorphism is L, Derived polymorphism is I
  VARIANT 356: note = Ancestral polymorphism is H, Derived polymorphism is Q
  VARIANT 349: note = Ancestral polymorphism is R, Derived polymorphism is H
  VARIANT 347: note = Ancestral polymorphism is L, Derived polymorphism is H
  VARIANT 313: note = Ancestral polymorphism is A, Derived polymorphism is S
  VARIANT 302: note = Ancestral polymorphism is D, Derived polymorphism is H
  VARIANT 294..462: note = Derived polymorphism lacks residues 294 to 462
  VARIANT 262..462: note = Derived polymorphism lacks residues 262 to 462
  VARIANT 253..462: note = Derived polymorphism lacks residues 253 to 462
  VARIANT 188..462: note = Derived polymorphism lacks residues 188 to 462
  VARIANT 132: note = Ancestral polymorphism is A, Derived polymorphism is V
MQAYASRGSLPTTIQLLACCFLPSPGSIPTTQALSEGARQAGSDQPPAGSRQRSSEVSPDSSHRDAGTSPCPWIVADGSGVRPDLVCCAVCAPRLALAQPTETSVFSLQRGAIHKFLHTRVPSRNIEEQKLVIVVWKQPGERISQENIDTNNNVSGHENPIGVEPESASACVDEQPFFSIDIYDPRNWDKLDNKARDVLVEKGPIREHNLEFPLDDNSRHFSYAHYSKVLKNGEIFKSNNMKSSLASDGLRDWRHLSVRLKEHEGTVEHKMSMTSWNELRIRLSNKETIDKELQGQLKKEQDHMKQVLFRLVAIVKFLSKRSLAFRGSSEKIYNESNEFDPVLQEHLRRIRNKEIHYHYLSHKIQNELISLLATIITNSIIEVVKRVKYFSIILDCTPDVSHQEQMTMIVRCVNMSENKIKIEEYFLGFLEVDDTSGLGLFNVLVDSMKSFGLNIEDRGPRL

SEQ ID NO: 20902 - protein, 329 aa, Zea mays
  VARIANT 257..329: note = Derived polymorphism lacks residues 257 to 329
MLDELTNFTELKMKISGVKIVVTAWTSQAMAKSRLHSVWIKAKNVPEELLNYQAICEMGSVLGAVEEVDLASLKSNDTVEKVETEGWNEEEASMRKRSSVDLQPNEFGLGDKGGKNPKVISKKVGSDEDLLSSQELNNFVKGMGVEIADDKELEMDEGELLKFQVEQQTVKDNKGKAKLVDQVEGTRKSSRLEGNEDIRITDKAINRAEAKDAFLNKGNNSNPFSILNSKNSLLIDIANKLGVNLGKGDNERLDNLEMIKCLDEERARAIMPVVSTDDIDNKLVGNLVENEDPSIMDRIVQEMIESESEGEKTKHRRRRKKYRKRKNIL

SEQ ID NO: 20903 - protein, 438 aa, Zea mays
  VARIANT 74..438: note = Derived polymorphism lacks residues 74 to 438
MVDRSRAVLIGVTAGVAAALVAAAGVLLAVWLYRRRASVAARTRSPESPSATLRAGGAGRASLDSSVSVSVVSESAADWGHPPPHKRAAFWAWRGGAGHNGREPPPLSVSGIPKYHYKDLQKATSNFTTILGQGSFGPVYKAVMATGEVVAVKVLASDSRQGEREFQTEVALLSRLHHRNLVNLVGYCVEKGQRILIYEYMSNGSLARLLYGDNKRSLSWQERLQIAHDVSHGIEYLHEGAVPSVIHRDLKSDNILLDHSMRAKVADFGLSKEEVYDGRKSGLKGTYGYMDPDYMSTNKLTKKSDVYSFGIILFELITAINPQQGLMEYINLAAIGGEGRVDWDEILDKDLLVGNIPEEVRMLADVAYRCVNKNPRKRPWISEVTQAISRLRQHQLIKHDAITLPRSETRTVLRRIDYQHVELSDLTSIKELTPIRAS

SEQ ID NO: 20904 - protein, 642 aa, Zea mays
  VARIANT 74: note = Ancestral polymorphism is N, Derived polymorphism is I
MPRNLECPVQTQMAVSALDRTLSSEYPTKSKSETKVGGWKRVFVQTDVGCVLAIQLNCGDNAHTVKRKLQVALNFPTDESVLKNDLSTIRNDFPLLLTKTFMHRSSSTPCLSPSGKDLQQQKDRGCPIELLVCPSRCSRTRQLVKDVARAIKKGVDPVPIKSGLGGAYYFRNSKGENAAIVKPNDEEPFAPNNPKGFIGKSLGQPGLKRSVRIGETCFREVAAYLLDYDNSANVPPTLLVKISHPVFHMNEDINFANKNIADGSIQAVSKTASFQQFIPHDFDASDHGTSSFPVSAVHRIGILDIRIFNTDRHAGNLLVRKQTGAGKFGNHTELIPIDHGLCLPECLEDPYFEWIHWPQASVPFSEDELEYIANLDPVKDADMLRMELPMIREACLRVLILSTIFLKEATAFGMCLAEIGEMMSREFTGMEDQPSELEFVCMEARRLAAEQEDSSTELDSGEEDLTQFELDNEYHEMLKEPSTRQFEFKTRNSRNQLSKLDEANEEEEEEEDDTEEVESDAGKLACPRPVNKWLANISKLSTSLKGVNLTNKTQRQLYAGPKFVDPVKSNSNDSGSQHCNWGSANDMLPSSVSFVKLADMKPETWCLFLEKFHELLPETFRSRKCIVKEQRAKQRLGTSCQF

SEQ ID NO: 20905 - protein, 731 aa, Zea mays
  VARIANT 353: note = Ancestral polymorphism is V, Derived polymorphism is I
  VARIANT 306..731: note = Derived polymorphism lacks residues 306 to 731
MGDGFAGFDPTESNLDCVGLGSQADHRQKKPEASFPDNSLDIFPNLRRESQITKFVDFKFLHQPGYKVLMEPVVLNREKAVADRLKRMPIFRLFDDYRDEDFYYGLPRKYSIVARVEVKFPIEPRFRDRQHFVLSDINGAKIEVITYLYQTVKHFDNLLHEKHVYKMHNVKFGLHPGEFNFRHLNSPMELYLNQQTIVEPYIVPIQVAPFPKQIFLNLADIVELPNRTLVDIMAIVVHLDTIHRTMWGPFRKIVIMDARGSLHIIKVWGDLLNKNALRRTLAKEDYGIIIETMFRRFRRQAPRKPWKQQQSNSRLSIPKHCTMELNCWVQGKLTLRGSNPRPNAGGEEEFLLVPATRLAAERSDDAPGQPVLLSRVFKSERIELSEDRLIAASTKGFRMVRATRGVVAGAWYFEVKVVHLGPTGHTRLGWATNKADLQMPVGFDAYGFGYRDVDGAKVTKAWRDKYADEGYGEGDVLGFYISLPDGERYEPKQPDLIQYKGMPFHVQVPKEEQKTPDPVPDLILNCESKKYPLLINRNRQFALPSSDQSKYRNVSDLCCNGGGGISINHMKEVDSHAPVKQKLQLFPINEATLKPFEKVDLLDSPIARLPDIETTTLGATYVASLDAGVWTKEQLFAEYAITNGVVNGSEAMSKESHENLTSKEPEDSGIKNMLRGDLDIPVQSSESTPYCPSHESFAISDHESVVPTIVEGDKETSGEQFDIQSRFYKPN

SEQ ID NO: 20906 - protein, 301 aa, Zea mays
  VARIANT 47: note = Ancestral polymorphism is A, Derived polymorphism is V
MSPFVLTLGKISRELSGNEAGRISREVFKIILDVPSVGGRLMLVDMAGSENIEAAGQTGFEAKMQTAKINQGNTALKRVVESIANGDSHVPFRDSKLTMLLQDSFEDDKSKILMILCASPDAKELHKTVSTLEYGAKAKCIVRVAHAATPRDKMSSEESSVEENWLKVTSKAIVGTLWSSVLTSESEQIARTHRRMARFERSGRQGRLMRELINLSVSWSWSVGERDAALRHRISHRAMRQCPTRGTASSTWGQARRACSSAHHLRVSSVGGLLGSQVPHSRGCSPWGRIRQTHRPFAPGP

SEQ ID NO: 20907 - protein, 499 aa, Zea mays
  VARIANT 454: note = Ancestral polymorphism is L, Derived polymorphism is S
  VARIANT 161..499: note = Derived polymorphism lacks residues 161 to 499
MGWKVASGCKAAGDKLRLPTSSAAARSRMKLWLVRATTTVLLWTCVVQLTAVGDTWGPRVLKGWPSCLTPREEEAAAARPRPLVVDRAALPPKRIYRNNGYLMVSCNGGLNQMRAAICDMVVIARYLNVTLVVPELDKTSFWNDPSEFQDIFDVEHFITSLRGEVRILRELPPRMKRRVELGMFHSMPPISWSDISYYQNQILPLIRKYKVVHLNRTDARLANNGLPMETQKLRCRVNYASLKFTPQIEELGKRVIRILRQNGPFLVLHLRYEMDMLAFSGCTQGCSTEEAEELTRMRYAYPWWKEKVIDSDLKRKDGLCPLTPEETALVLRALDIDRSMQIYIAAGEIYGGKRRMAALTSAYPNVVRKETLLEPSDLMFFQNHSSQMAALDYLVSLESDIFVPTYDGNMAKVVEGHRRFMGYKKTVLLDRKLIVELVDRYTNGSLQWDEFSALIKVAHTKRMGSASKRMVIPDRPKEEDYFYANPQECLQDRYLLQNS

SEQ ID NO: 20908 - protein, 309 aa, Zea mays
  VARIANT 75: note = Ancestral polymorphism is S, Derived polymorphism is C
MHDRSHKPQPAEAGNGGPAGEGGGGNVDRVLFKNLVEMVPLVESLMDRRVNPAYSRRASLVYTPAPPKKASDLKSVKLPQSVSAKKRRDPGDIAKKSTPDSNGDNGSVVPLSLSGAENMPKDEVAVLSEQINDLQKKLLEKEEALRSAESSVTEMNAAYATIDELRRLVADKEALIRSTNSQLHDAKIMLADKQASLEKLEWEVKMSNKKVEDLQGDMSNMGFEISSLMVFFEKISENVSGDSYDDIIPSSYELETLQSMSEIDKIEVDKLDKERVTYAEALAAARENPDEEHLNIAAEARSRLQVLVL

SEQ ID NO: 20909 - protein, 78 aa, Zea mays
  VARIANT 5..78: note = Derived polymorphism lacks residues 5 to 78
  VARIANT 7: note = Ancestral polymorphism is R, Derived polymorphism is G
  VARIANT 14: note = Ancestral polymorphism is P, Derived polymorphism is S
  VARIANT 24: note = Ancestral polymorphism is T, Derived polymorphism is I
  VARIANT 35: note = Ancestral polymorphism is V, Derived polymorphism is M
MYFWYFRPFPSWSPFLVSTNFYCTIKYDFIFMYKVFVFVAAECENPHDSLNQKTDICEGEVPWAPHSEFCQALPHHGG

SEQ ID NO: 20910 - protein, 291 aa, Zea mays
  VARIANT 69: note = Ancestral polymorphism is G, Derived polymorphism is S
MSCPINVEEAQRSRAITVADCAPGDATPAVTEISATGKRGIPVLVAPLHSQRECEGSGGRRASAEEMMSMGFQGFLLLEEKDDDDPVAQRKKWFKEMRGWLMVLATVAASVTYQAGLNPPGGFWQDGDRAGNPVLRDRHWSRYMIFYYLNATAFVTSLVIMVLLMNERFYHTETKVVALMLTTFIDLISLIGAYIAGTTRFFSSCIYIIVIVCVAFAGVIYFGEVMAEICKFTVRKMPCMLRLTQNKWFPMPAEVVKGLQQEEERISQKRTTAGNGQRGGCCACCAPRAEG

SEQ ID NO: 20911 - protein, 96 aa, Zea mays
  VARIANT 82: note = Ancestral polymorphism is E, Derived polymorphism is D
  VARIANT 81: note = Ancestral polymorphism is E, Derived polymorphism is K
  VARIANT 58: note = Ancestral polymorphism is T, Derived polymorphism is S
  VARIANT 48..96: note = Derived polymorphism lacks residues 48 to 96
  VARIANT 24: note = Ancestral polymorphism is G, Derived polymorphism is R
  VARIANT 16: note = Ancestral polymorphism is G, Derived polymorphism is S
  VARIANT 15: note = Ancestral polymorphism is T, Derived polymorphism is I
MDFIKFDVGNVVMVTGGRNTGRVGVIKNREKHKGSFETIHVEDSMGHQFATRMGNVFTIGKGNKPWVSLPKGNGIKLSIIEEQRRRDFIAQATANA

SEQ ID NO: 20912 - protein, 85 aa, Zea mays
  VARIANT 9..85: note = Derived polymorphism lacks residues 9 to 85
  VARIANT 5: note = Ancestral polymorphism is R, Derived polymorphism is G
  VARIANT 3..85: note = Derived polymorphism lacks residues 3 to 85
MMYYRKALEIQCLQDMTDPAKVDRDRSIGSYQELQSDIEMAQAIADIKFTYVVSCQVYGMQKTSKDLNEKRRYQNIIGLMIMYRS

SEQ ID NO: 20913 - protein, 293 aa, Zea mays
  VARIANT 88: note = Ancestral polymorphism is W, Derived polymorphism is L
  VARIANT 99: note = Ancestral polymorphism is T, Derived polymorphism is K
MAPSTRATLSLPAAPPMASRLRLVDPTPSTDADSAQNPGISGKAAGEGERVGEAKTPQPRQPDVTDLGGGSEVVYIPRFVAREKAWEWFDYLDNAIPWTRPEIRVFGRSAIQPLIQVPFPLAFFLQPRDVCYVADEGLTDLRYSGHQPLAHSWDEFPVLKDVLKVVHEALPGSYFNSLLLNRYKTGSDYVSWHADDEPLYGPTPEIASVTFGCERDFLLRKKPTKSQATSGSGEAGRKRLKVDAPQKPHHFLLKHGSLLVMRGYTQRDWQHSVPKRAKVSSPRINLTFRHVLR

SEQ ID NO: 20914 - protein, 80 aa, Zea mays
  VARIANT 39: note = Ancestral polymorphism is G, Derived polymorphism is A
MAEESGRPLPKFGDWDVNDPASADGFTVIFNKARDEKKGGNGQDTESPSKDTRTERVESYAAKPSTKKWFCCVTASPTQS

SEQ ID NO: 20915 - protein, 225 aa, Zea mays
  VARIANT 157..225: note = Derived polymorphism lacks residues 157 to 225
  VARIANT 144..225: note = Derived polymorphism lacks residues 144 to 225
  VARIANT 116..225: note = Derived polymorphism lacks residues 116 to 225
  VARIANT 66: note = Ancestral polymorphism is T, Derived polymorphism is N
  VARIANT 51: note = Ancestral polymorphism is P, Derived polymorphism is L
  VARIANT 34..225: note = Derived polymorphism lacks residues 34 to 225
MDRKEDGPGSRCGHTLTTVPATGEEGSLGYVGPRLILFGGAIALEGNSATPPSSAGSSRIRLAGANADVHCYDVLSNKWTRLTPLGEPPSPRVAHVATAVGTMVVIQSGGSRSWYWSTVWTCDGLGKRPLTDVWAFDTVAKPYEWRKLEEHATMIHQGLDSKPPFVDLSVGTPQEDVNDSEELDTTMEPEDLPETKDDASATEKFESKSVKSSTHVNSDNFVGDV

SEQ ID NO: 20916 - protein, 205 aa, Zea mays
  VARIANT 44: note = Ancestral polymorphism is M, Derived polymorphism is T
  VARIANT 56: note = Ancestral polymorphism is T, Derived polymorphism is N
  VARIANT 135: note = Ancestral polymorphism is A, Derived polymorphism is V
MDRSNAGAVSVEVRGGGGGSPPGAGRKRRAVARGVQKTLSKTSMLANFLPTGTLLTFEMLLPAAAGDGTCSAVSAAMLRALLALCAASCFLFHFTDSFRAPDGKVYYGFVTPRGLSLFRTGLGVEVPREERYRLAFVDVVHAVMSVLVFAAVTLADYRVSGCLVAGHRKEMDEVMESFPLMVGAVCSGLFLLFPNTRYGIGCLAP

SEQ ID NO: 20917 - protein, 479 aa, Zea mays
  VARIANT 1: note = Ancestral polymorphism is M, Derived polymorphism is I
MSSPAPSSASRSSHGSRGSPRIVLFPSAGMGHLVPFTRLAVALSAGHGCEISLLTALPTVSSAESRHIAALYAAFPAIRQLDLRFAPFDASSEFPGADPFYLRYEALRRCAPSLLGPLLAGAGASALVVDMALASVAIPVARELHVPCFVFFTASATMLSFKAYFPTYLDDVGAGHGVGDVDVPGVYRIPSSSVPQALHDPDNIFTRQFVANGRALATADGLLVNAFHAMEPEAVEALQGRFVLSVLPPVFAVGPLMPVNDLRETGEAAQKQGNYRAWLDEQPPRSVVYVSFGSRKALPKDQIKELAAGLEACGHRFLWVVKGAVVDRDDAGELSELLGEAFLRRVHGRGLVTKSWVEQEEVLRHPAVALFVSHCGWNSVTEAVSSGVPVLAWPRFADQRVNARVVVRCGLGVWADQWSWEGEEALVRAEEITALVMEAMEDDAMAVKAANVREAASRAVVDGGTSYRSLAAFVRRCTA

SEQ ID NO: 20918 - protein, 196 aa, Zea mays
  VARIANT 41: note = Ancestral polymorphism is P, Derived polymorphism is L
  VARIANT 72..196: note = Derived polymorphism lacks residues 72 to 196
  VARIANT 119: note = Ancestral polymorphism is D, Derived polymorphism is Y
  VARIANT 158: note = Ancestral polymorphism is D, Derived polymorphism is Y
  VARIANT 159..196: note = Derived polymorphism lacks residues 159 to 196
  VARIANT 161: note = Ancestral polymorphism is V, Derived polymorphism is M
  VARIANT 171: note = Ancestral polymorphism is T, Derived polymorphism is P
MTDGESRLSCLSLATSSATPSAHKQYYQSAFLFNLFEADIPLDADARTRRGAQKVTLIPRGAGADPTLVSKQQIFARIVGGRAAEEVILGEPEVTTGAAGDLQQMGPWALMEPAAQSGDVVLRMLARNSVSENLAADIDDQAYDVAKEHVRRNRAAIYQLVDVVMETETLTGDEFRAILSEHVDRETAAPTELVTA

SEQ ID NO: 20919 - protein, 1034 aa, Zea mays
  VARIANT 788..1034: note = Derived polymorphism lacks residues 788 to 1034
MRLVVRVIEARGLPPTDADGTREPYAKAQLGKQRAKTKVMRKTLCPVWDEEFTFRVGDLSDNLLVSVLDEDRYFADDVLGQVKVPLTAVLDADNRTLGMQWYQLQPKSKKSKLKDCGEIHLSVSLAQNYSDETTAHWASDDHDLASNSDKSTELVKGSSFSNIPIEVRTQVSEVDETEVAKEDKSNAAPSFVNKLYQMFNSKPKDAEASAPSSSKLNDASDITEEMLSTNSEAPDKQDLDASASMSFDELLKAFGSRGEGKEMPENLSGGVVLDQVYAVAPSDLNTLLFSPSSDFLQSLAEIQGTTGLEIQQWRLENDGEILRRVVSYTKAPTKLVKAVKATEDMTYLKADREMFAVLADVSTPDVPFGNTFRVEVLTCIIPGPELPDDEKSSRLMVSWRINFVQSTMMKSMVENGAKQGLKDNYVQFSELLAKNFRPVDAKDTTYSNEVLSSVQPEQESDWKLAFRVFGNFTLFSSVFAFVYVSAHIFLTSPSIIQGLEFPGLDLPDSVGEVVVCGVLILQGQRVLNMVARFIQAKRQRGDHGVKAQGDGWLLTVALMEGTNMAATKSSDYSDPYVVFTCNGKTKTSSIKFHTLEPQWNEIFEFDAMEDPPSVMEIHVYDFDGPFDKVASLGHTEVNFLKYNNISKLADIWIPLKGKLAQACQSKLHLRIFLNNTRGTEVVKDYLDKMEKEVGKKIAMRSPHTNLAFQKIFSLPPEEFLINYFTCHLKRKMLTQGRLFLSPRIFGFYTNIFGHKTKFFLLWEDIEDILLVPATLSLMGSPSLVIILRKGRGMDAKHGAKQLDSQGRLNFHFQSFVSFNVAHKTITALWKARSLTPEQKVELVEEESETEEFQNVEGESFLGIEDAQMSGVFSSTKPFDVTTLMGIFEGGPLECRVMEKVGCMDYSVTAWEPVRADIYQRQVHYKFDKKSVRHGGEAMSTQQKSPLPNKNGWLVEEVMTLEGIPVGECFNLHIRYQLENNVSKQKTCTIQVSIGIVWLKNCKNRKKITHDIATNASSRLKKIFSQFEKEPIPAK

SEQ ID NO: 20920 - protein, 84 aa, Zea mays
  VARIANT 17..84: note = Derived polymorphism lacks residues 17 to 84
  VARIANT 37: note = Ancestral polymorphism is G, Derived polymorphism is S
  VARIANT 39: note = Ancestral polymorphism is G, Derived polymorphism is S
  VARIANT 44: note = Ancestral polymorphism is R, Derived polymorphism is S
  VARIANT 63: note = Ancestral polymorphism is A, Derived polymorphism is G
  VARIANT 70: note = Ancestral polymorphism is P, Derived polymorphism is L
  VARIANT 74..84: note = Derived polymorphism lacks residues 74 to 84
MRTCAERMCMPAPSIEQFIDAVKQTVLANKRWIPPTGKGSLYIRPLLMGSGAVLGLAPASEYAFIIFVSLVGNYFKVGTSCFKI

SEQ ID NO: 20921 - protein, 224 aa, Zea mays
  VARIANT 62: note = Ancestral polymorphism is I, Derived polymorphism is T
  VARIANT 16: note = Ancestral polymorphism is A, Derived polymorphism is E
MASRQALHIFTPSRRAMHILTSSRGIASTPHLSSFGWFDKIKSTITGKKPEEASEASSFTLIQFADTMEKARKLGTFKNFVAGRASEATVVNVFEKHSAVLRYLGAIDPTGENLRNTDKINATKHCNCTIADVEHILAKYTWAKEAQKKIAKLKEEGKPLPKSFNEVQNLMGSTPVDVGRSNLAKSGQISRNAFCPCGSKKRYKRFDISRTVSITKLHMPFFDD

SEQ ID NO: 20922 - protein, 148 aa, Zea mays
  VARIANT 49: note = Ancestral polymorphism is S, Derived polymorphism is Y
MAAAAAAASKACAPGMRDEQVKGLLLGLPPNARAEDIEYVLGDVQRTLSRLDSKRIVLQDEIAAASRGKRRASRRAPAAAPVPAAANGSGALYTRNGAGAVRRRLRTAAGDVKKEKKRLEAAWGDLEEALVDARERLALQPGPGERTA

SEQ ID NO: 20923 - protein, 130 aa, Zea mays
  VARIANT 53: note = Ancestral polymorphism is S, Derived polymorphism is N
  VARIANT 33: note = Ancestral polymorphism is R, Derived polymorphism is C
  VARIANT 26: note = Ancestral polymorphism is A, Derived polymorphism is T
MPRPGAPTQFRRQFPPTRWACEFNAALTMPFFRWLVGPSKVVEVEVGGLRQRSEVHIEKCRYLESSGCVGMCVNMCKVPTQDFFTNEFGLPLTMNPSECSAWLYYSGGDEHGLIDPWPSVDLNQVHISKT

SEQ ID NO: 20924 - protein, 343 aa, Zea mays
  VARIANT 170: note = Ancestral polymorphism is V, Derived polymorphism is L
  VARIANT 124: note = Ancestral polymorphism is G, Derived polymorphism is E
MDDVHVWFVSLACLGGLYIAAICWRPLAYLALCLRGPKDLHRYGSWAMVTGPTSGLGRSMAMELARRGLNLVLLDLDANNLQETSEAIKSVHPVKIRTVVLDLSLVATPEGDKAIRRLREAIEGLDVGILVNNAAVNTPGAVYLHEADIERFVRMIRVNLWGLTEVTAAVLPSMLARRRGAIVNVGSGSTVAVPSFPLYTVYSSTKKYVAHLSRSLYVEYKSKGIDVQYQVPFYVHTRMLSSAVKAKLRPWFVATAEDYTSTAARWIGNGPVCVPGAAQNLQWCLTGFVPDWVHDWYRIRLHLQHRAVLRGGRAAIASAHSRAEKAVTPDDDDANSVAPKISA

SEQ ID NO: 20925 - protein, 244 aa, Zea mays
  VARIANT 111: note = Ancestral polymorphism is R, Derived polymorphism is W
  VARIANT 98: note = Ancestral polymorphism is P, Derived polymorphism is L
MLSRLPATVSLLRRSLREPRGFSSSVLASSKETADGKLVASVLFERLPVVIPKIHPVVYAFQEFSFRWRQQYRRQYPEEVLGKADARGKGDYHIDYVPAPRITEADKTNDRKSLQRALDNKLYLLLYGNAYGAPDGKPVWHFPEKVYENEETMRLCAEAALKSVLGGLDHTYFVGNAPMAHMAVEQTDSSVSSFKRFFFKSQVVGTTKYHVGKCNDFAWVTKDELLEYFPENKDFFNKMIIHIR

SEQ ID NO: 20926 - protein, 28 aa, Zea mays
  VARIANT 1: note = Ancestral polymorphism is L, Derived polymorphism is M
MITSADSRIRVVNGDEFVHRRRKGRKES

SEQ ID NO: 20927 - protein, 161 aa, Zea mays
  VARIANT 138: note = Ancestral polymorphism is G, Derived polymorphism is R
  VARIANT 136: note = Ancestral polymorphism is D, Derived polymorphism is Y
  VARIANT 107: note = Ancestral polymorphism is H, Derived polymorphism is N
  VARIANT 103..161: note = Derived polymorphism lacks residues 103 to 161
  VARIANT 84..161: note = Derived polymorphism lacks residues 84 to 161
  VARIANT 60: note = Ancestral polymorphism is L, Derived polymorphism is S
  VARIANT 52..161: note = Ancestral polymorphism lacks residues 52 to 161
  VARIANT 35: note = Ancestral polymorphism is P, Derived polymorphism is H
  VARIANT 10: note = Ancestral polymorphism is Q, Derived polymorphism is K
  VARIANT 9: note = Ancestral polymorphism is W, Derived polymorphism is R
  VARIANT 7: note = Ancestral polymorphism is S, Derived polymorphism is P
MVLNCKSLWQIFLCTFLVRTGNPQPSTLLAPTKVPSTVGQTMDLLLVLKFDRCIHDISCSLIPFVSCSLVHCYDIFAPFVGNDRPTMEWPTRLKIALGAAKGLAHLHENCHPKIIHHDIKATNILLDFKFEAKVADFGLAKFTTDNNTHVSTRVMGTFRYV

SEQ ID NO: 20928 - protein, 302 aa, Zea mays
  VARIANT 107: note = Ancestral polymorphism is L, Derived polymorphism is R
  VARIANT 92: note = Ancestral polymorphism is R, Derived polymorphism is W
  VARIANT 87: note = Ancestral polymorphism is A, Derived polymorphism is V
  VARIANT 13: note = Ancestral polymorphism is A, Derived polymorphism is G
MSVCGVQQWARDAEAALDHELQAMHSSVSEAISSDAAALLYPYSDVPGFMATMSLAISKLASLEAFVRQADALRLQTLHRLPQILTARQSARCFLAIADYSHRLRARSELWHTRQGHEPAATCKIFLGNLAVSVIIPSGSTSGAPWPSPSSSSAAGSTSASAAPGSRRRPTPRAQLNLTVLGEPDPRFVFEFDGETECSPQVLQVKGSMKQPMFTCKFSCRSNSDLRSRLVAVAPSSFPPDAGIFSARLPTSTRTKGHGSMASWLADRNACDADPSSLVRREAMRTGSETERGGRENLLETV

SEQ ID NO: 20929 - protein, 295 aa, Zea mays
  VARIANT 122: note = Ancestral polymorphism is N, Derived polymorphism is S
  VARIANT 126: note = Ancestral polymorphism is Q, Derived polymorphism is L
MEGAVTENAAVPVRAAAPEAAVHSDQHVESGAMVEDSAASTVAPESTSDADQAIEDAAPEDGVDEDTVTNVDVSPEDMRSIIEVIADTGKFWHDWRFLKSVLSIQLKQVLDEYFEVEMVSQNDGQLRSFSELFSRLNGALERFEEGPPFTLQRLCEILLDPKGTYTKLPKLTLALEKNLLVTSTITKCTDPYPAAHGLPCSDCTQITEISGPADVESVSTPEHTTAVPNGTEHVAGDVDGEMAEAEAEESSGSHDIEMQEDKRDQVDNVNADANPGAAAAPEAVNASESTSQPQS

SEQ ID NO: 20930 - protein, 326 aa, Zea mays
  VARIANT 183..326: note = Derived polymorphism lacks residues 183 to 326
  VARIANT 218: note = Ancestral polymorphism is R, Derived polymorphism is C
  VARIANT 286..326: note = Derived polymorphism lacks residues 286 to 326
MALQPRKLAAYWILASHRRRSLPLHLLSEVLRMPQPVAFVSVQPSDGQPTPSNVLNKKMKHGGESQNYQQDDFHKTVARTLSQGSTPMSMDFHPLQQTLLNVGTNVGDIGSWDVSTKDRLVVRNFKVWDLSKCTIILQASLVKDPVVSVNRIIWSPDGTLFGVAYSRHIVQIYSYNGGDDIRQHLELSENMSLKLDKLLSSSTNNFWASGLVFVMVPRHLAFMINGVSQALCCSYTVMLSCKLYFGYFIPVAAPYSTIINFRVEGFNLLSTSSRVICSFEGRCILQEDTNSVAENAEYKDRDIESLSLCCYVLGPRGRGFYKYLYL

SEQ ID NO: 20931 - protein, 233 aa, Zea mays
  VARIANT 17: note = Ancestral polymorphism is V, Derived polymorphism is A
  VARIANT 20: note = Ancestral polymorphism is A, Derived polymorphism is V
MVKSRGFVMAAVMVVAAVVVVVSVAPRGAEVKTTIEPCSGSDSCPALLGYTLYADMKVSEVAALFVVDPVALLATNALDFGAPGAAHRILPMGLFVRVPTRCSCADGVRKSVSVRYTACPADTLATVSDVVFAGLASSDQIRNENGLTSADPDAPLDAGQKLAIPLPCVCFNSSDNNLPAVYLSYVVQVGDTVPAIAASYETTVTDVMNVNAMGSPVAAPGDILAIPLPGRST

SEQ ID NO: 20932 - protein, 82 aa, Zea mays
  VARIANT 40: note = Ancestral polymorphism is R, Derived polymorphism is W
  VARIANT 23: note = Ancestral polymorphism is A, Derived polymorphism is D
  VARIANT 20: note = Ancestral polymorphism is K, Derived polymorphism is E
  VARIANT 15..82: note = Derived polymorphism lacks residues 15 to 82
  VARIANT 10: note = Ancestral polymorphism is S, Derived polymorphism is L
MESTVEQISSSVQSWVKDHELAAIGGVLAAAVGASVAYSWRKAPQHSRTEPDSTPAQSQCGIRDGGEIRGGGDGGRFSSAAK

SEQ ID NO: 20933 - protein, 501 aa, Zea mays
  VARIANT 404: note = Ancestral polymorphism is H, Derived polymorphism is R
MAGGRAFRPSAPRRAAFAALLTLLLLAGLSFLLSSTPTSSARSSSPPSARLAAVRRHAADHAAVLAAYAAHARKLKEDSAAQSLSFSSLSSDLSALSARLASHLSSSLPEDALRPLEKEARERIKFARGLAADAKEGFDTQSKIHKLSDTVFAVGEQLSRARRAGRMSSRIAADSTPKSLHCLAMRLLEARLANPTAFADDPDPSPEFDDPALYHYAIFSDNVLAISVVVASAARAAADPSRHVFHVVTAPMYLPAFRVWFARRPPPLGVHVQLLAHSDFPFLNATNSPVVRQIDAGNRDVELLDYLRFYLPDMFPSLRRVVLLEDDVVVQKDLAALWQVDLDGKVNGAVETCFGGFRRYRKYLNFTQPIVRDRFKPNACAWAYGVNVFDLETWRRDGCTELFHQYMEMNEDGELWDPTSILTAGLMSFYGNTKPLDKSWHVMGLGYNPSISPEAIRSAAVVHFDGNMKPWLDVAMNQYKALWTKYVDTEMEFLTRCNFGL

SEQ ID NO: 20934 - protein, 144 aa, Zea mays
  VARIANT 36: note = Ancestral polymorphism is E, Derived polymorphism is K
  VARIANT 14: note = Ancestral polymorphism is G, Derived polymorphism is W
  VARIANT 3: note = Ancestral polymorphism is R, Derived polymorphism is Q
MARASPVMAALEEGFERIDVARGRLRQTQFKQSTTEDRDLEVAGSFRRPSMALVCCSRGTRERGERNVEASPRKLGGVHGVLLKARHERALAGDWLSMAVATATRLAACCSRCLPAATVEHALDGFFGVFCLDSDPDHCRRYVS

SEQ ID NO: 20935 - protein, 93 aa, Zea mays
  VARIANT 6: note = Ancestral polymorphism is R, Derived polymorphism is C
  VARIANT 9: note = Ancestral polymorphism is A, Derived polymorphism is V
  VARIANT 20: note = Ancestral polymorphism is T, Derived polymorphism is I
  VARIANT 36: note = Ancestral polymorphism is A, Derived polymorphism is V
  VARIANT 47: note = Ancestral polymorphism is A, Derived polymorphism is V
  VARIANT 52: note = Ancestral polymorphism is R, Derived polymorphism is C
  VARIANT 54..93: note = Derived polymorphism lacks residues 54 to 93
  VARIANT 69..93: note = Derived polymorphism lacks residues 69 to 93
  VARIANT 73..93: note = Derived polymorphism lacks residues 73 to 93
  VARIANT 84: note = Ancestral polymorphism is G, Derived polymorphism is E
  VARIANT 90: note = Ancestral polymorphism is F, Derived polymorphism is L
MTGDARAIAAAGCHRGLAWTGHLGLPPAQPTPWLGAPSTRDGSAGPAALGRRRRAPARQGRSPFPCTFQGRRRWTNLQIPEQQGDFVLKFENS

SEQ ID NO: 20936 - protein, 471 aa, Zea mays
  VARIANT 152: note = Ancestral polymorphism is D, Derived polymorphism is E
MGSLPLLAACCSLLLTVAAPARDSTTSVCASQIGDFPHRNSSGLHLTLHHPQSPCSPAPLPSDLPFSTVLTHDDARVAHLASRLAASDPPSRRPTSLRKQKKAAGGASGGHHLDDDSLASVPLSPGTSVGVGNYVTQLGLGTPSTSYAMVVDTGSSLTWLQCSPCVVSCHRQVGPLFDPRASSTYTSVRCSASQCDELQAATLNPSACSASNVCIYQASYGDSSFSVGYLSTDTVSFGSTSYPSFYYGCGQDNEGLFGRSAGLIGLARNKLSLLYQLAPSLGYSFSYCLPTAASTGYLSIGPYNTGHYYSYTPMASSSLDASLYFITLSGMSVGGSPLAVSPSEYSSLPTIIDSGTVITRLPTAVHTALSKAVAQAMAGAQRAPAFSILDTCFEGQASQLRVPTVVMAFAGGASMKLTTRNVLIDVDDSTTCLAFAPTDSTAIIGNTQQQTFSVIYDVAQSRIGFSAGGCS

SEQ ID NO: 20937 - protein, 667 aa, Zea mays
  VARIANT 12: note = Ancestral polymorphism is L, Derived polymorphism is Q
  VARIANT 13: note = Ancestral polymorphism is F, Derived polymorphism is S
  VARIANT 14: note = Ancestral polymorphism is V, Derived polymorphism is A
MVANQNITLFILSVGLSIAGFTAGDDDQFVYTGFASSNLTLDGGATVTPSGLLELTNGTVRQKGHGFHPSSVLFYESSSGAVQSFSVSFVFAILSTYPETESGHGLAFFIAPDKNLSGSFPTQYLGLFSDQTNGDPNSHIFAVELDTVQNYDLQDINSYHVGINVNSLRSIRSHDAGYYDDKSGLFKDLSLDSHEAMQVWVNYNRETTQINVTIAPLNVAKPVRPLLSANYNLSAVITNPAYIGFSSSTGSVSGQHYLLGWSFGINSPAPPIDITKLPEMPRLGQKARSKALQITLPITILALFLAASITIFLFVRRKLRYAELREDWEVEYGPHRFSYKDLFDATRGFREANLLGTGGFGMVYKGILRGSRLNIAVKRVSHDSKQGIKEFITEIVSIGHLQHRNLVPLLGYSRRKGELLLVYDYMPNGSLDKYLYGKEGKPTLDWNQRFQIIKGVASGLLYLHEECEKVIIHCDIKASNVLIDNEIHGRIGDFGLAKLYDHGTDPEATHVVGTIGYLAPEVARTGRATPLTDVFAFGIFILEVTCGQRPIKQSTQDRQVMLVDWVLEHWHKGSLTDTVDIKIQGEYDIDEACLALKLGLLCSHPFTSARPNMRQVMQYLNKEMPIPELTPNLSFSMLALMQNDELIMHCPSEIGFGTISTISGVRR

SEQ ID NO: 20938 - protein, 673 aa, Zea mays
  VARIANT 406..673: note = Derived polymorphism lacks residues 406 to 673
MPEKKHKWLILYHLLYLSILNFTSFIIAGDQFVYSSFREANLSLDGTATIKPDGLLELTNGSFNLKGHAFYPTPLHFRKSSGENVKSFSVTFIFSILSAYPDKSADGMTFLVTTNKNFSDAFPAQYLGLLNDQNNGNPNNHIFAVELDTIQNSEFEDINDNHIGININGLHSVQSQGAGFYDDKNGMFKNMSLISREVMQVWVEYDGWTTQIDVTLGPIKMAKPNRPLVSAIYNLSTVLTDTSYIGFSSSTGVINSRYCLLGWSFSMSNTTPEIDITKLPKLPRVGSRSPSKVLTIILPTAIASFIFVTGITIILLARRKLANNELQEDWEVEFGPHRFTYKDLFLATEGFKNKNVLGAGGFGKVYKGILPTSKLEIAVKRLSHNSKQGTKEFITEIVSIGHLRHRNLVQLLGYCRRKGELLLVYDYMPNGSLDKFLYCENDKPSLDWATRFHIIKGAACGLLYLHEKWDKVVIHRDIKASNVLLDSKFNGRLGDFGLAKSYNHGTDPQTTRVVGTMGYLAPELVRMGKASPLTDVFAFGTFLLEVTCGHRPVKQNELGEHIMLVDWVLDHWQKGSLVETIDKRLEGNCNIDEACLVLKLGLLCSQPFASARPSMHLVIQYLNGGMQLPEFTPSDISINMLAFMENRGFNPSLISYPQLTMSVGTMSSLSGGR

SEQ ID NO: 20939 - protein, 466 aa, Zea mays
  VARIANT 182..466: note = Derived polymorphism lacks residues 182 to 466
MASSSSALLALPVLVLSIAFSIVHGTADDAQRYMVVASSSLEPSEVCSGQKVTSSKNGATLPLVHRHGPCSPVMSKEKPSHEETLGRDQLRAANIHAKLSSPRNSSAKELQQSGVTIPTSSGYSLGTPEYVITVSLGTPAVTQVMSIDTGSDVSWVQCAPCAAQSCSSQKDKLFDPAKSATYSAFSCSSAQCAQLGGEGNGCLNSHCQYIVKYVDHSNTTGTYGSDTLGLTTSDAVKNFQFGCSHRANGFVGQLDGLMGLGGDTESLVSQTAATYGKAFSYCLPPSSSSAGGFLTLGAAAGGTSSSRYSRTPLVRFNVPTFYGVFLQAITVAGTKLNVPASVFSGASVVDSGTVITQLPPTAYQALRTAFKKEMKAYPSAAPVGILDTCFDFSGIKTVRVPVVTLTFSRGAVMDLDVSGIFYAGCLAFTATAQDGDTGILGNVQQRTFEMLFDVGGSTLGFRPGAC

SEQ ID NO: 20940 - protein, 90 aa, Zea mays
  VARIANT 19: note = Ancestral polymorphism is P, Derived polymorphism is L
  VARIANT 31..90: note = Derived polymorphism lacks residues 31 to 90
  VARIANT 41: note = Ancestral polymorphism is R, Derived polymorphism is C
MYLIGALEEASLSTVRRFPFPASSPDQDLTQFICRSSHNGRDVMKKLNFVVEMRHQLQPAKANLQVSYVIDPKGTSSGQESLRPLLSTSK

SEQ ID NO: 20941 - protein, 292 aa, Zea mays
  VARIANT 5..292: note = Derived polymorphism lacks residues 5 to 292
  VARIANT 7..292: note = Derived polymorphism lacks residues 7 to 292
  VARIANT 115..292: note = Derived polymorphism lacks residues 115 to 292
MGSIESQRSVTTHLIVVNLSFTHSSGQDSTPHQPENENIAAPARLHSSLRVCATTPTVWSAVRGFLLHYYIVAPVWPCPSYPPRPNAKNVDDRDGMAAADPDTEVQAEFPPLVRQYKSGRVERFFNLAPLPAGTDPATGVVSKDVVVDPATGLWARLFLPAGSHRKKLPVVVYYHGDAYVIGSAVDPMTHGYLNALVAKAGVLAVALEYRLAPEHPLPAAYEDIGEGTAGADRDWRSWPARDPRRGRDPGRGRRGTVPVRSWGRGTAGAGGLLPCARVGGCGGRRGQPGCGR

SEQ ID NO: 20942 - protein, 333 aa, Zea mays
  VARIANT 305: note = Ancestral polymorphism is G, Derived polymorphism is V
  VARIANT 176: note = Ancestral polymorphism is L, Derived polymorphism is H
MAFRSCLVRLLLPMAALLLLAASSPAAAQLVAGYYSKTCPDAEAIVRNETEKIIAAAPSLAGPLLRLHFHDCFVRGCDASVLLDDPNGGNKAEKDAKPNRSLRGFGSVERVKAKLEAACPSTVSCADVLALMARDAVVLAKGPSWPVALGRRDGRVSSATEAADSLPPAFGDVPLLAKIFAANGLDLKDLAVLSGAHTLGTAHCPSYAGRLYNFSSAYGGADPSLDSEYADRLRTRCGSVDDTATLSEMDPGSYKTFDTSYYRHVAKRRGLFQSDAALLADATTREYVLRMATGRFDGVFFQDFGESMIKMGNAGVLTGAAQGEIRKKCYIVN

SEQ ID NO: 20943 - protein, 217 aa, Zea mays
  VARIANT 152: note = Ancestral polymorphism is A, Derived polymorphism is V
MAGRSMATRCCAALLLPMALVLFAGSSPPVLAQLELGYYSKTCPNVEAIVRKEMEKIISAAPSLAGPLLRLHFHDCFVRGCDASVLLNSTAGNRLSEMDATPNRSLRGFGSVDRVKAKLEAACPNTVSCADVLTLMARDAVALAKGPVWAVALGRRDGRVSSATEAAGQLPPSYGDVWWFMDVVAINLKKYWWGWCNGVEIFGDSPFWVGSPLVLIA

SEQ ID NO: 20944 - protein, 201 aa, Zea mays
  VARIANT 120: note = Ancestral polymorphism is L, Derived polymorphism is F
  VARIANT 45: note = Ancestral polymorphism is T, Derived polymorphism is M
MLNILVCIITIISNFMKLDITVGRIPHITDTTKHTPSCNYLAEVTSSSPDRTISDTLRHWQQKATVLVMEARCVNWLVGLFTGKGKDSLRVFIKEDIKEFCFKLAEISRITILDFANLKLPIFIARPDRVEDGIRKCYQEAKNKPRDQKIDLLLAILLDRNDSLYGSVYGQTQYDEKQSTAGYPYVLLDSAVVQFGIAFYY

SEQ ID NO: 20945 - protein, 1729 aa, Zea mays
  VARIANT 691..1729: note = Derived polymorphism lacks residues 691 to 1729
  VARIANT 643..1729: note = Derived polymorphism lacks residues 643 to 1729
MGHNAGRTPFIDISNTSITGDQNGSNSLRPIVDANEHKRQRDKERYATMSIEQKNEKNRKRREARQRNKGLPIKSESSREDINTNQTREAVNVEISRDVHLGSVNCRTIHITNFAFCTTVYLANARMIMVGPIKNTPSAGNSIERKRQRDRERRATMSVEQRNEYNNKRCQMRQRNKGQNVMPAISGDGDKKVNVDPDDDSDWLHRNETFQSNDYVATTDLLPPGSVHESVGTIGESGIGVREYRLERLRLYNQTPKRKEAKIEYMRKHRVLHADTLNVVSIAMEDPTYTPEVVHPATEPSTVTACDWVIPEFVRTPFLPAQTQTEDVGSFDMSTEAIKRKHHVSRGERQAILARRNQQFQASIARNVTTLNGDTISDANNNGNYYPNGSCTTAIAYSQTNRVFPSAQCSVPCQAATLPTNGSEGITEQASGVEHTQEKPRVISNDDDDEVVIFGEDDDNDERYIFDGQYEETDEDIKIDGTQDESTGTDVPDPYDKVYSNLPEETHMLKPVPDCGYCTAKKFEYEPPGFCCRGGKVELAPLDTPPQLRRLWDSADSDAKHFRDNIRFFNGHFSFTSLYCCLDSMTTNVRDSGIYTFRAQGMMYHNIKSFGKEGGSEHKHLELYFYDDDPSLEHRYRKCREEQLQKDKEVIKQIVGILHGNPYSEHLRSLGHVENLDDYHIALNLDQTLNQKTYNTPLTSEVAAVWIEGSERGELGWHANIPKVGVSMDEMDAYRATYRANNANDENAESPTHLCVSIRPGVFNPILHGKRLFQQFAVDTYIKIENSRLDFIRKNQDRLRADLYQGLVDSMLDGDIRAEKVGKRTLSTSFIGGPRDMKRRYMDAMALVRKFGKPYIFLTMTCNPNWDEIRRELLPGQTLQDRPDLVVRVFHAKLEELKHRLTKQDIFGKVRAYVYVVEFQKRGLPHAHFLLIMQRKYKLTCPEQYDLLISAEIPHNKYPELRKMYIYKGHDRASVVMRDASKADDDVDEIKQYRDARWVTPPEALWRIYGFELSQNSPPVMQLQLHLPNMHMVAFHERQMVERVINRPGADRSMLTTYFEANRLHEGARGILYRDFPEWYTWQSGKGKVWQRRKRDTGGQVGRIVSAHPAEGERYYLRVLLNHVTCATSYVDLRTVDGVTLPTFCEAAERRGLLESDNTLDECLTERALFQMPSALRRLFATILVYCEPSDVAVLWQRHLDAMSEDYQHRSQSKTHVEQMVLIDIRNMLQSMGKDIKTFPLPPIIDTYDDAIGTAREGAAYDRILSAVDTDQGGLFFVDGPGGTGKTYLYRVLLATLRGQGKIVVATATSGVAASIMPGGRTAHSRFKIPLTIDDGAICSFTKQSGTAELLRKASLIIWDEASMTKRQAVEALDNSMRDIMGRPKLPFGGKTIVFGGDFRQVLPVVRKGSRAQVVASSLRMSYLWESMSHLKLVSNMRAKNDPWFAEYLLRVGDGTEDTNSDGDICLPDEVCVPYSGSDSDLDNLIDFVFPNLNENMSDSTYITSRAILSTRNDWVDMINAKMIDRFQGEHMVYHSFDSAMDDPHNYYPPEFLNTLTPNGLPPHVLKLKIGCPVILLRNIDPANGLCNGTRLVIRGFQRNSIDAEIVLGQHAGKRIFLPRIPLCPSDEEMFPFQFKRKQFPVRLSFAMTVNKAQGQTIPNVGVYLPEPVFSHGQLYVALSRATARSNIKILAIPAVDVKKRSRKGVKKNPTIDCGTCTKNIVYKEVLTN

SEQ ID NO: 20946 - protein, 469 aa, Zea mays
  VARIANT 142..469: note = Derived polymorphism lacks residues 142 to 469
MASALQLSLLVLCSYGCTIALAVATGHQERKFTVVPTAFLQSSSEEASCSTPRGTPHANRVSVPLAHRNGPCSPVRGKGELPRAEMLRRDRERTEYIIRRASRSRRLQDNNDAVSVPTQLGSSYDSQEYVATVGLGTPAVPQTLILDTGSSLTWVQCKPCNSSQCYPQRLPLFDPNTSSSYSPVPCDSQECRALAAGIDGDGCTSDGDWGCAYEIHYGSGATPAGEYSTDALTLGPGAIVKRFHFGCGHHQQRGKFDMADGVLGLGRLPQSLAWQASARRGGGVFSHCLPPTGVSTGFLALGAPHDTSAFVFTPLLTMDDQPWFYQLMPTAISVAGQLLDIPPAVFREGVITDSGTVLSALQETAYTALRTAFRSAMAEYPLAPPVGHLDTCFNFTGYDNVTVPTVSLTFRGGATVHLDASSGVLMDGCLAFWSSGDEYTGLIGSVSQRTIEVLYDMPGRKVGFRTGAC

SEQ ID NO: 20947 - protein, 155 aa, Zea mays
  VARIANT 74: note = Ancestral polymorphism is L, Derived polymorphism is H
  VARIANT 22: note = Ancestral polymorphism is G, Derived polymorphism is V
MGTVPGQPTFSTVTLAGINVGGKKLDLRPSAFSGGMIVDCGTVITGLQSTAYRALRSAFRKAMEAYRLLPNGDLDTCYNLTGYKNVVVPKIALTFTGGATINLDVPNGSLVNGCLAFAESGPDGSAGVLGNVNQRAFEVLFDTSTSKFGFRAKAC

SEQ ID NO: 20948 - protein, 401 aa, Zea mays
  VARIANT 11: note = Ancestral polymorphism is R, Derived polymorphism is S
MEAPQPWVILRRVLVRKDPEAKQAGHPPAISTALRSPPRVTNLAVAVGPNAHPGRPVRFYEVPYLVATGPSALLYCFYFDVIPLVTDELLLARRFVAPADAKRQPTTGSADRVPRRTGSSSMPVTYNIRNVGLIPGLSGGYVIAELQVTKRSNRAKLFRLMSGDDRRSEAGRLFEGDRQRWYETELHCPLPTMEREWAPQGVVSLANKLWWFDLSWGLLSCDPNDIVHPVLSYHKLPPGCVFLEPMAFIHYIRCICVSENMLRYVEMVRGSFRDGMFVGEQKVVMWTLVPVPSGDGDIEWKWHKSYEMDFKDIWDDAIYKAAGLPALVPQIVLVSPRNHNVVYFFRDNRLFGIDVPSHRLVHVLEDCYKLEAPVHSLSVFPWDLPSWIANGLRVLVNAGRT

SEQ ID NO: 20949 - protein, 363 aa, Zea mays
  VARIANT 57..363: note = Derived polymorphism lacks residues 57 to 363
MSRASKSNVSIPTHLGGSVDSLEYVVTVGLGTPAVSQVLLIDTGSDLSWVQCAPCNSTTCYPQKDPLFDPSRSSTYAPIPCNTDACRDLTRDGYGSDCTSGSGGGAQCGYAITYGDGSQTTGVYSNETLTMAPGVTVKDFHFGCGHDQDGPNDKYDGLLGLGGAPESLVVQTSSVYGGAFSYCLPAANDQAGFLALGAPVNDASGFVFTPMVREQQTFYVVNMTGITVGGEPIDVPPSAFSGGMIIDSGTVVTELQHTAYAALQAAFRKAMAAYPLLPNGELDTCYNFTGHSNVTVPRVALTFSGGATVDLDVPDGILLDNCLAFQEAGPDNQPGILGNVNQRTLEVLYDVGHGRVGFGADAC

SEQ ID NO: 20950 - protein, 589 aa, Zea mays
  VARIANT 54..589: note = Derived polymorphism lacks residues 54 to 589
  VARIANT 64: note = Ancestral polymorphism is T, Derived polymorphism is M
  VARIANT 74: note = Ancestral polymorphism is P, Derived polymorphism is L
  VARIANT 84..589: note = Derived polymorphism lacks residues 84 to 589
  VARIANT 170..589: note = Derived polymorphism lacks residues 170 to 589
  VARIANT 357..589: note = Derived polymorphism lacks residues 357 to 589
MASNNNNNKVASSHSPMASGGTQSHTQSQPGAGAGAGDGAKPSSSSMEYQLRQYLLLLASLVATVTYGAGLNLPGGAWQVNDGQHHAGDSILQDAHRHRYLIFYYCNATAFAASLVVSVLLLVLDGKNTGWWEALLRVVMVLDLLGLMGAYAAGSCRDKFTTIYSALLVCAVFAYVVAAFCWYLGVLALPRKKHRDDHNTAKNNDTSAANVHGYEREELDEVLMLLATFAVTITYVAGLNPPGGFWGDTKDGHQMSDPVLQENYSRRYWAFYVCNTTAFVASLLIIILVVDKKLTAKLSVRFVAHGAPGPHGGLRRWELQGGVKGWCFDRPQDHHPDPQISSDSATTTCRDQKHEDEAVEVEKARSLVMLLATLVVSITYQAGLDPPGGLWPDTRDGHRNGDPILLTTQPTRYKVFFYSNSAAFVASLIVILMVQSRFLLKRHTLEAAMILDLFGLISAYAAGSCRDKTTSIYVVALAGVVLVYVVIHIVFFTLDHKDNHRDKEKLETRREVLLLLAILAATLTYQAGLTPPGGFWPENDGARGHRAGYPVLHDNYCPRYSAFFYCNAASFMASVALIVLLVNPNQGRS

SEQ ID NO: 20951 - protein, 265 aa, Zea mays
  VARIANT 2: note = Ancestral polymorphism is A, Derived polymorphism is S
  VARIANT 14: note = Ancestral polymorphism is A, Derived polymorphism is V
  VARIANT 152: note = Ancestral polymorphism is T, Derived polymorphism is I
  VARIANT 166: note = Ancestral polymorphism is R, Derived polymorphism is S
MASKQIGVLTCFIAITALAFRPCASAVPMDGGWSNGGATWYGPAKGAGSDGGACGYQGAVDQPPFSSMITAGSQSIFQDGKGCGTCYQVKCTGHESCSGSPVTVVITDLCPDATCQVEPVHFDLSGTAFGAMAKPGQADMLRNAGRLQVQYTRVACNWNGLDIAFRVDAGSNANYLAMAIEYESGDGDLRAVELKQSGAAAWAPMQRSWGAVWQYKSGSTNLQAPLSVRLTSGSGRVLVASNVIPAGWQPGRTYRSVVNFGGNHA

SEQ ID NO: 20952 - protein, 484 aa, Zea mays
  VARIANT 147: note = Ancestral polymorphism is P, Derived polymorphism is L
  VARIANT 109: note = Ancestral polymorphism is R, Derived polymorphism is C
  VARIANT 50: note = Ancestral polymorphism is D, Derived polymorphism is E
  VARIANT 20: note = Ancestral polymorphism is P, Derived polymorphism is L
MSSPAPSSPSRSSHGSRSSPRIVLFPSAGMGHLVPFTRLAVALSAGHGCDISLVTALPTVSSAESRHIAALYAAFPAIRQLDLRFAPFDASSEFPGADPFYLRYEALRRCAPSLLGPLLAGAGASALVVDMALASVAIPVARELHVPCFVFFTASATMLSFKAYFPTYLDDVGAGHGVGDVDVPGVYRIPSSSVPQALHDPDNIFTRQFVANGRALATADGLLVNAFHAMEPEAVEALQGRFVLSVLPPVFAVGPLMPVNDLRETGEAAQKQGNYRAWLDEQPPRPVVYVSFGSRKALPKDQIKELAAGLEACGHRFLWVVKGAVVDRDDAGELSELLGEAFLRRVQGRGLVTKSWVEQEEVLRHPAVALFVSHCGWNSVTEAVSSGVPVLAWPRFADQRVNASVVVRCGLGVWAEQWSWEGEEALVRAEEIAALVMEAMGDDAMAVKTANVREAASRAVVDGGTSYLCLAAFVHRCIAPREVI

SEQ ID NO: 20953 - protein, 368 aa, Zea mays
  VARIANT 40: note = Ancestral polymorphism is R, Derived polymorphism is W
  VARIANT 73..368: note = Derived polymorphism lacks residues 73 to 368
  VARIANT 107: note = Ancestral polymorphism is P, Derived polymorphism is L
  VARIANT 126..368: note = Derived polymorphism lacks residues 126 to 368
  VARIANT 187: note = Ancestral polymorphism is R, Derived polymorphism is L
  VARIANT 194: note = Ancestral polymorphism is R, Derived polymorphism is H
  VARIANT 203: note = Ancestral polymorphism is P, Derived polymorphism is L
  VARIANT 204: note = Ancestral polymorphism is E, Derived polymorphism is K
  VARIANT 247: note = Ancestral polymorphism is H, Derived polymorphism is L
  VARIANT 248: note = Ancestral polymorphism is A, Derived polymorphism is V
MRKSWRSLASALLAAALAITVAALRPVTEHADAKGPPPLWFGLGAFKVALFANLQTRGRTGAPRRTPRPTASWPPSSTPRTQGVSWATVFGNHDDMAVERPPVWFSPDGVPPLRWPPGPGSGCGLQGTPQTDLVAAETGANRGRTTAPGRTRSTWLSPRISAGFSSASMTASTAPEAPDFLIANLYRFLLRELRGIFYKEADPKSKRLWQFLADGEDEDSELDFSGSGRFALSLARLKEQRHPLWALVAAAGDGQSGRECGVKRLTAAPAVRDHRARWDDEDWLIGSMWVEDIGVGLETETRIPGYLAIGLEALQLSTDHSTSIEEEVQRIRREHLDDDQCVVNDRVKGRLTVTRAFGAGYLKQVKRL

SEQ ID NO: 20954 - protein, 111 aa, Zea mays
  VARIANT 84: note = Ancestral polymorphism is S, Derived polymorphism is Y
  VARIANT 78: note = Ancestral polymorphism is N, Derived polymorphism is K
  VARIANT 50: note = Ancestral polymorphism is K, Derived polymorphism is M
  VARIANT 49..111: note = Derived polymorphism lacks residues 49 to 111
  VARIANT 48: note = Ancestral polymorphism is I, Derived polymorphism is M
  VARIANT 17: note = Ancestral polymorphism is K, Derived polymorphism is E
  VARIANT 15: note = Ancestral polymorphism is A, Derived polymorphism is T
MQAFQRTIEFEEELAEEFSGGTTNARNKETTSDDEDEGGGHNKIVSDIRKKYEKKLAAPNDEDKDKQKDLSVPGAGFNLHGIISSCCEPYMIVYIELEEKALVDQLEKLVQ

SEQ ID NO: 20955 - protein, 607 aa, Zea mays
  VARIANT 93..607: note = Derived polymorphism lacks residues 93 to 607
  VARIANT 534..607: note = Derived polymorphism lacks residues 534 to 607
  VARIANT 536..607: note = Derived polymorphism lacks residues 536 to 607
  VARIANT 554..607: note = Derived polymorphism lacks residues 554 to 607
MDEVDAYRATHRASNANDEDAGVFNPILHGKRLFQQFAVDTYIKIESSCLDFIRKNQDQLRADLYQGLVDSMLDGDVRAEKVGKKYKLTCPEQYDLLISAEIPSNKYPELRKMVIKHMMHGPCGSLNHNCPCTKGRASCKNQYPRHFREATLQGKDSYPNYRRRDDGHKEKVRGCELDNRWVVPYNPYLLQLFNCHINVEACGSIKVVKYLFKYIYKGHDRASVVMRDASKENDDVDEIQQYRDARSMITAYFEANKLHEEVRGILYRDFPKWYTWQQGKVWQRRKQNTGGQSMGKDIKTFPLPAIIDTYDDSQGIDREIYKEESIEATAEDVALQETLNEEQKSAYEKILSVVDTSNGASIMPGGRTAHSRFKIQLTIDDGAICTFMKQSGTSKLLQKASLIIWDEASMAKRQSIEVLDNSMRDIMGRPGLPFGGKTIVFGGDFRQVLPIVPCSQHESKERPMVYKIFVGVGGGTEEVNNDGDVRLPDEHAGMRVFLPRIPLCPSDDEMFPFHFKRKQFPVRLSFAMTVNKSQGQTIPNVVVYLPEPVFSHGQLYVALSRAITRLNVKILVIPVTDEKMKKGVQKKSTINGVTYTKNIVYKEVLTP

SEQ ID NO: 20956 - protein, 565 aa, Zea mays
  VARIANT 25: note = Ancestral polymorphism is D, Derived polymorphism is V
  VARIANT 67..565: note = Derived polymorphism lacks residues 67 to 565
MERWEDSVEKRVTTWGASQQNYHHDRKLLRHLLFPSRRSSSCNDSSPKSALPLSPPSSPTSGDLSRQIWAVLALGHLRPTMGSESEPAKGLLPYLQRADELQKHEPLVAYYCRLYAMEKGLRIPQKERTKTTNSILISLMNQLEKARSYIRDKKSLTLGPDDNLHLEGFALNVFAKADKQDRAGRADINTAKTFYAASIFFEILNQFGELQPDIEQKQKYAIWKAAEIRKALKEGRQPEAGPPGGGKDEAPVNTTTISQDMARSHSFSSANQGSEASPRPVNMDFSRRGSFSAVQPGNNLPPQSTEFNDHPSTQSPYSSPPPSQSQHPSPSQSYSSPSYQATDYPSSDIHKPSPNYSSSPYTSTDYPTNELHKPPSNYSPPPYTRTDHPSNDGYNPHSNDKPDVSAYPQAYQPPPYTIDPQHISQNYYSTKAPAAPYNYPNFQSYPSFQDSTSPSVPTEPTYQSSFYPATDGPAATSYTPASNSSAPTHYHSTADYSPQVTPPAAPPASQYKYDSSYQPEVEKIAEAHKAARFAVGALAFDDVSVAVDHLKRALDLLTNPSAEPR

SEQ ID NO: 20957 - protein, 215 aa, Zea mays
  VARIANT 11: note = Ancestral polymorphism is P, Derived polymorphism is L
  VARIANT 20: note = Ancestral polymorphism is G, Derived polymorphism is R
  VARIANT 65..215: note = Derived polymorphism lacks residues 65 to 215
MSSSKTYTGLPVLMDLCLFGTLPLLMGNRQGENLLIDLFRHCDNHLGEKQVNNPFFHKTPSGSARQPLQLTNDVTKMMQKHQLETPQFHQTRFSVLQNVPRSTEKDVSFLIPHSWLPAMLDDQMSFPSLRQTRTTGCFRLHPIRDEDAKFKLCNRRSVQFDVGNMVMVTGGRNTGRVGVIKNWEKHKGIFEVIDVLLGAFCMLCLVFSYLLYRKT

SEQ ID NO: 20958 - protein, 490 aa, Zea mays
  VARIANT 278..490: note = Derived polymorphism lacks residues 278 to 490
  VARIANT 322..490: note = Derived polymorphism lacks residues 322 to 490
MDLDPSFPGPISITPDRQISPLFSDPFSPRAASKLFSSTHPKPLSPTDGRKDRFSSVLTAVSPRTGKRDILSKTPKVASPKAEGKTKLVNGLIAEDQDSGVAEIPQKVEMQTDILWSQANTQNTNALAEPIVSHPLADRMSLNYSSMYGAEDDFRAHVSSIGADMDEGTPPDHECLVIGAGLPISSPLSYHEEYEDNSISNGTNDDWLPIVMPAKKLISNENLKAILSRTSNERIYAEMFLPSIGWSLPSRIQPLLAAINSCKIPEFSYDLSWLNHAWLLDESQVVTEVNVMVQNCVGLELRDSSYYLAPRWVAIFRRIYNWRLAKLCTGKFSEAYVLTQHLYQAPAAAGSNGTTQGLTANTASSDDVDHIMMPAISTGITLDEIIEISCDLDVVDVQPITLPPRLHVHVHEEPQAVTDNNGVHGVDEMYIPRRVELGEVMPIDTDDKLSRLRVELGEVMPIETDDKLSRLLEQCTKLQDRIDETLSIYF

SEQ ID NO: 20959 - protein, 167 aa, Zea mays
  VARIANT 19: note = Ancestral polymorphism is L, Derived polymorphism is I
  VARIANT 42: note = Ancestral polymorphism is L, Derived polymorphism is R
  VARIANT 49..167: note = Derived polymorphism lacks residues 49 to 167
  VARIANT 50: note = Ancestral polymorphism is H, Derived polymorphism is Y
  VARIANT 52..167: note = Derived polymorphism lacks residues 52 to 167
  VARIANT 57: note = Ancestral polymorphism is S, Derived polymorphism is R
  VARIANT 121: note = Ancestral polymorphism is S, Derived polymorphism is F
  VARIANT 126..167: note = Derived polymorphism lacks residues 126 to 167
  VARIANT 140..167: note = Derived polymorphism lacks residues 140 to 167
MDGESKLLASGGEDCTIRLWSMSTRAKNHPLIATFHGHEKALSFLSVAWHKSSLLVSCSKDSKVKVWDTVAPSSGSSPCVGSAHLNSNGPPIAMKCHESLCYIAAGAEVTVIDLRTMKKAFVLALQNHRILSCDIFYDAQNDFLTPEWDSENLQVVPSVIQTITNPF

SEQ ID NO: 20960 - protein, 366 aa, Zea mays
  VARIANT 169: note = Ancestral polymorphism is R, Derived polymorphism is W
MADRRSNGGSPPSWSFASQSSHYHLAAMRGSYAPQSLWRPSPMPVRGAALSSTPHVVASAPAEKNFAADFLLGGVSSAVSKTVAAPIERVKMLLQNQDELIRTGRLSEPYRGIGDCFGRTVRDEGFLSLWRGNNTNVIRYFPTQALNFAFKDYFKGLFNFNKDRDGYWRWFAGNIASGSAAGATSLLFVYSLDYARTRLTSDYRAAAKGGERQFTGLVDVYRKTLRSDGVVGLYRGFNVSVAGIVVYRGLYFGMYDSLKPVLLTEKLQDNFFASLALGWMITNGASLASYPLDTIRRRMMMTSGEAVKYKSSMDAFAQIVRNEGPKSLFKGAGANVLRAIAGAGALAGYDQLQLIFFGKKYGSGGA

SEQ ID NO: 20961 - protein, 471 aa, Zea mays
  VARIANT 323: note = Ancestral polymorphism is L, Derived polymorphism is Q
  VARIANT 344: note = Ancestral polymorphism is E, Derived polymorphism is G
  VARIANT 358: note = Ancestral polymorphism is N, Derived polymorphism is T
MEMVECSLVATLAPRPLPGQVRKALPRPAAFGARARLRVRSVGREEPLHPQQTAVRASGPDHGGRALGQAAVGFAAAAVVSLTGFSGDVSPLPTPPARAESLTVAFPVSKARECPDWDQKLQQTMVEIFPLKSADAAYSKISGMLSTLGDPFTRIISPKEYQSFRIGSDGNVQGVGVFINKEPSSGRLGGPADRAGIHEGDELVEIDGKSVSGLDGEAAAQRLRGRVGTTVKVKLLDGTDDERGGGLRQKEVQLSREIINLSPLSTAIISHRTDDGHECKTGYVRLASFYQGGLVKAGLDVAQIWLDGDETLVNTIDREGNVLPINMIQGHSLTHDPLVVLVYGTCQKEPQYYTDMLNMSMKEAQVQVKSWQGHYMTMDELFWLAIEPLSVTELDDGSALFITVAKYLSPALHEIDQVGIQPDIQCSPDILSLPRAPSLRENSNATNLEMDSCIMVAEQALEIQQSKGSAS

SEQ ID NO: 20962 - protein, 242 aa, Zea mays
  VARIANT 4: note = Ancestral polymorphism is P, Derived polymorphism is L
  VARIANT 14: note = Ancestral polymorphism is H, Derived polymorphism is Y
  VARIANT 16..242: note = Ancestral polymorphism lacks residues 16 to 242
  VARIANT 50: note = Ancestral polymorphism is T, Derived polymorphism is N
  VARIANT 56..242: note = Derived polymorphism lacks residues 56 to 242
  VARIANT 76: note = Ancestral polymorphism is I, Derived polymorphism is T
  VARIANT 92: note = Ancestral polymorphism is T, Derived polymorphism is M
  VARIANT 95: note = Ancestral polymorphism is A, Derived polymorphism is V
  VARIANT 96: note = Ancestral polymorphism is H, Derived polymorphism is Y
  VARIANT 158: note = Ancestral polymorphism is E, Derived polymorphism is K
  VARIANT 159: note = Ancestral polymorphism is P, Derived polymorphism is L
  VARIANT 167: note = Ancestral polymorphism is P, Derived polymorphism is L
  VARIANT 170..242: note = Derived polymorphism lacks residues 170 to 242
  VARIANT 180: note = Ancestral polymorphism is G, Derived polymorphism is S
  VARIANT 184: note = Ancestral polymorphism is D, Derived polymorphism is N
  VARIANT 193: note = Ancestral polymorphism is T, Derived polymorphism is A
MTDPLRQSWASCYHDWHRQHIGWFSYPPQYDREDVELVRGAMETLMSALTPIETSQGPNTQVQPASESYNKDVPIIHVDMHTYSLDEKIRMTLEAHIVEKTDEVHEVSFVGFSSQAKSFCKTMDRTFAIDLYSSYIKQKLSEFSLSSSSKCLVALIIEPGGILMIVPLFQRVLSTSELLGCSPDIACYAKLMTEVIVPLSATLAIEEVFESFKSDSKFMALLHDHSYTAHAMGYTATLNAMD

SEQ ID NO: 20963 - protein, 388 aa, Zea mays
  VARIANT 48: note = Ancestral polymorphism is G, Derived polymorphism is C
MIITRKSEGVRVLCKFFMHGACLKGEYCEFSHDWSDQANNVCTFYQKGACSYGSRCRYDHVKVSRNPTVPPPRPTSSTSRRASTSLQLSSYNHPPHMVHQTDSSNQRHQISVDVLAHSASKPAWRNDFQHDIVSDDGIDWSSNQNLINQTSLKPVDLPICSFAAAGNCPYGEGCPQMHGDLCATCGKLCLHPYRPDEREEHIKLCEKNHKRLVALKRSQEIECSVCLDRVLSKPTAAERKFGLLSECDHPFCIECIRNWRSNSPASGMDVNSALRACPICRKLSYYVIPSVLWYFSKEEKEEITESYKSKLKSIDCKYFDFGTGSCPFGTSCFYKSTTLNPCCLHVLQHAYRDGRLEEVILRHLDADDGSTVIAKSIRLSDFLGRMDL

SEQ ID NO: 20964 - protein, 81 aa, Zea mays
  VARIANT 12: note = Ancestral polymorphism is V, Derived polymorphism is A
MEMKKVACAVLAAAASATVVLAAEAPAPAPTSASSAAFPAVGAVLGASVLSFFAYYLHFIFMAIDFFLYSDFQNRGLYWRG

SEQ ID NO: 20965 - protein, 124 aa, Zea mays
  VARIANT 3..124: note = Derived polymorphism lacks residues 3 to 124
  VARIANT 42: note = Ancestral polymorphism is I, Derived polymorphism is T
  VARIANT 77: note = Ancestral polymorphism is P, Derived polymorphism is A
MAEKKQRPGGSRKDEVVTREYTINLHKRLHGCTFKKKAPNAIKEIRKFAQKAMGTTDIRIDVKLNKHIWSSGIRSVPRRVRVRIARKRNDEEDAKEELYSLVTVAEIPPEGLKGLGTKVVEDDE

SEQ ID NO: 20966 - protein, 627 aa, Zea mays
  VARIANT 75: note = Ancestral polymorphism is R, Derived polymorphism is W
MHDPSEIRNLPIDIAFGRLQEWLVDRKRVPHDWRKRLAGIRARIAPAFSALPRNLHPSLLALDPEGSRVVPPSQRVISVRISPCSCKPYPPAEPRHFLPYLAFLGRSILFSYSICCVECNPFLLVPCLGLEIGYLEAKKIYSILLESNTESRNIFGRLTGSAGEWESIIKAYEKDHVFLGEAAQIMVQNVNYDIPYQRKQMQKTQQQLAELDRREADIKRLAALSATRYVEACQELGLQGINVREELIESAKTLPSTFSKILEVLNSDPVSNAMEYYTTFVKDCHTEDKRNSDSVLPKLKDLQANPPSLHVSVYNEIKSSLGEASKSPGFTVIAGEIDSNVAAADDIDWDISVDTNEIDWDIGAVEQPGEESGDGFGSYEIIDANIELAGSENYNVGVSDKSMNKEDLASSESGICWDITADSSEEIASIQNASSVLEQSQSQMIAEDRSLLLEKEYRNNILDDLLEVKSFLTQRLGEMRNADTSSLQHQVQAVSPFVLQQHAPDSLENMLVEISSAISLLTNQKTLDLIMILNSKRFLDRLVSSLEEKKHHEVKLREGLGDLSVKRMELQNALSSSWPKQEAAITKTRELKKLCESTLSSVFDGRPVYIIGEINTLLSSSVSQLAG

SEQ ID NO: 20967 - protein, 153 aa, Zea mays
  VARIANT 14: note = Ancestral polymorphism is S, Derived polymorphism is F
  VARIANT 16: note = Ancestral polymorphism is R, Derived polymorphism is H
  VARIANT 25: note = Ancestral polymorphism is G, Derived polymorphism is R
  VARIANT 35: note = Ancestral polymorphism is A, Derived polymorphism is V
  VARIANT 38: note = Ancestral polymorphism is A, Derived polymorphism is V
  VARIANT 44..153: note = Derived polymorphism lacks residues 44 to 153
  VARIANT 47: note = Ancestral polymorphism is E, Derived polymorphism is V
  VARIANT 59: note = Ancestral polymorphism is T, Derived polymorphism is I
  VARIANT 60: note = Ancestral polymorphism is V, Derived polymorphism is A
MEFLCVVAGKHVWSVHVDLHILDDGGNLIDAANIAALAALSTFWRPECTVGGDDGQQVTVHDPEVRDPLPLTIHHMPIAVTFAYFGEGNIVVLDPTYKEEAVMGGRMAAIVNSNGDVCAIQKAGGEGLMSSVTMQCLRIASVKAADITSKIKK

SEQ ID NO: 20968 - protein, 246 aa, Zea mays
  VARIANT 7: note = Ancestral polymorphism is F, Derived polymorphism is L
  VARIANT 11: note = Ancestral polymorphism is K, Derived polymorphism is N
  VARIANT 34: note = Ancestral polymorphism is R, Derived polymorphism is C
  VARIANT 47..246: note = Derived polymorphism lacks residues 47 to 246
  VARIANT 65: note = Ancestral polymorphism is A, Derived polymorphism is V
  VARIANT 70: note = Ancestral polymorphism is E, Derived polymorphism is Q
  VARIANT 85: note = Ancestral polymorphism is A, Derived polymorphism is P
  VARIANT 185: note = Ancestral polymorphism is G, Derived polymorphism is D
  VARIANT 191: note = Ancestral polymorphism is I, Derived polymorphism is T
  VARIANT 194: note = Ancestral polymorphism is R, Derived polymorphism is W
  VARIANT 206: note = Ancestral polymorphism is M, Derived polymorphism is T
MLLVQLFNTGKNPYVRGSGKKWIGTLLDGSSSIRLSSMLFIHLGDSGFGFSAMEVEVNRGFNSDAVLAMETIHSLSASKSSYPMADLTQLFMTATQEGKRSESQGQILRVVLVKPHDVSVTICDVYIFSDIRSLDYHERCWHYSFVETAARVKVIDFGSALPWRVLDVNGLKREAASRGGATGHGKPRLLIISRRGSRRFLNEREMERAAGDAGFEMCGNGVRCFGRFIAEIENLWYGVLCITRGI

SEQ ID NO: 20969 - protein, 71 aa, Zea mays
  VARIANT 4..71: note = Derived polymorphism lacks residues 4 to 71
  VARIANT 16: note = Ancestral polymorphism is A, Derived polymorphism is E
  VARIANT 36: note = Ancestral polymorphism is S, Derived polymorphism is F
MFAYLLDLFVPWRLLAVIGTLLCIVLISGLFFIPESPRWLAKMNIMDDCETSLQVLRGFDADITSELNDIK

SEQ ID NO: 20970 - protein, 112 aa, Zea mays
  VARIANT 13: note = Ancestral polymorphism is G, Derived polymorphism is S
  VARIANT 14: note = Ancestral polymorphism is A, Derived polymorphism is T
  VARIANT 30: note = Ancestral polymorphism is A, Derived polymorphism is T
  VARIANT 32: note = Ancestral polymorphism is A, Derived polymorphism is V
  VARIANT 38: note = Ancestral polymorphism is E, Derived polymorphism is K
  VARIANT 53: note = Ancestral polymorphism is R, Derived polymorphism is C
  VARIANT 68: note = Ancestral polymorphism is G, Derived polymorphism is D
  VARIANT 83: note = Ancestral polymorphism is A, Derived polymorphism is T
METLLKASAYILGATSSSIVYKVMLADGTALAVRRIGESGGTEKLKDFEAQVCAVARFCHPNILRLRGFYWGADEKLLIHDYAPNGSIANIAFSSKPFVAHLGHTLLYHIQH

SEQ ID NO: 20971 - protein, 761 aa, Zea mays
  VARIANT 382..761: note = Derived polymorphism lacks residues 382 to 761
MAVAVVDPRGTAAVWCVCRGSASGGERDDPDPHHRVRGVQRERDGVTVQHGRQGRVRPGVQALAEPARDAHPAEDEDDAEAGPFAQRRLPPTASVRPARTASPAAGALHRLTPARERIKSSPAPTGAAVSAPKPSNFQSHAGEYTPERLRELQKNARPLPGSLLRAQPRTPATEPRSQKLSGTPASSTPATTTAAATEMVLVLKGLVKPMSEASIGLRIPKHDKEEDKSEEEGKGDEEDEGPQPRHAAPDYISLDVGGVLSSQNAAGESSDEDDNEITDQIAMYTDKPSDGPRSTKGVFSGISNRGPATSLGAFSDGSRKVVDDRDDDDDEEEERKWEEEQFRKGIGRRMDDASTQRSANGVPAAMQVQPQPFGYPVSSHYQPSLSGVVPTASVFASGTAEFLSIAQQADVANKALQDNIQKLRETHKTIVSALVKTDTHLNEALSEISSLESGLHDSEKRFVYMQELRDYISVMCDFLNDKAFLMELEENIQQLHEKRALAISERRAADLADESGVIEAAVSAAVSILSKGSSSTCLSAASNAAQAAAAAARGSSNLQPELDEFGRDINMQKRMDLKRREEGRRQRKTQSETKRLASAAKNKDIKKIEGELSTDESDSESTAYVSSRDEFLKAADHVFIDAKEEYSSLRIVKNKFEGWKAQYPSAYRDAHVALSAPSVFSPYVRLELLKWDPLHETTDFFDMDWHKIYSLLCKKDESTYKLEEDAQDLGLSIELLPLSHPDEQFDMSPFYAAIVVSRLRL

SEQ ID NO: 20972 - protein, 186 aa, Zea mays
  VARIANT 45..186: note = Derived polymorphism lacks residues 45 to 186
  VARIANT 63: note = Ancestral polymorphism is F, Derived polymorphism is S
MGSGSFLKVLAKNFDVLAGPLISLAYPLYASVRAIETKNPVDDQQWLTYWVLYSFVTLFELTFAPIIEWLPFWSYAKLFFNCWLVLPWFNGAAYVYDHFVRPMFVNRRIVNIWYVPRNEKLGKSDDVLSAAERYIEQNGPEAFEKLISKSTKSSKSRSTKRSILEEAEAERESWGENPFYDKNYRH

SEQ ID NO: 20973 - protein, 87 aa, Zea mays
  VARIANT 66: note = Ancestral polymorphism is S, Derived polymorphism is L
MSSRRSRASTVSEEEINELISRLQTLLPSARRRGGSQASTTKLLKETCSYIKSLHREVDDLSDRLSDLMASMDHNSPGAEIIRSLLR

SEQ ID NO: 20974 - protein, 351 aa, Zea mays
  VARIANT 2..351: note = Derived polymorphism lacks residues 2 to 351
  VARIANT 6: note = Ancestral polymorphism is S, Derived polymorphism is I
  VARIANT 27: note = Ancestral polymorphism is R, Derived polymorphism is W
  VARIANT 225: note = Ancestral polymorphism is I, Derived polymorphism is T
  VARIANT 281..351: note = Ancestral polymorphism lacks residues 281 to 351
MQAFLSNLSKCEEGHDDQTEDWMKQIRDVAYDIEDCIDDFVHSLRPDPRGSGWVTAVRKILYEIRTWYPRRNIATQIVDLKNRAQHIGERRTRYKHGTGFAATGHKASITGVQYYADIGGFGEISGCLQKMNSAHQLIGRPTEEDLGSWGHHCDPSTVPDTILQCSAGEEDCKSHVMRIAGGALCHDRAPGPNLISPAAGRDWRANFVDNLVRTARRSICLLFIIVVFRDKYLSSDPNKLNDMKQDVFGSYRNIFGYSRNTRDDMLPLSSTSEESRFMKMLENNSRKTRNSVTTLKELCTVEGYNLVFQACPSPADGLVGKESYAQIQIGRQILGKGDAGSGIFAARGETE

SEQ ID NO: 20975 - protein, 556 aa, Zea mays
  VARIANT 150..556: note = Derived polymorphism lacks residues 150 to 556
  VARIANT 234..556: note = Derived polymorphism lacks residues 234 to 556
  VARIANT 254..556: note = Derived polymorphism lacks residues 254 to 556
  VARIANT 324..556: note = Derived polymorphism lacks residues 324 to 556
  VARIANT 360: note = Ancestral polymorphism is Y, Derived polymorphism is D
  VARIANT 402: note = Ancestral polymorphism is P, Derived polymorphism is L
  VARIANT 413: note = Ancestral polymorphism is R, Derived polymorphism is C
  VARIANT 427: note = Ancestral polymorphism is R, Derived polymorphism is C
  VARIANT 477: note = Ancestral polymorphism is R, Derived polymorphism is W
MAAPREEGATELNQESRWPILDEIEANDYDNFTRRAYVPKTKKLMALPKAYLRSLNVRNTNKPMDTFVKKVTELNRKMNEVDEESKQVSYPVIRDDNGNDKLDCPALGKQFAAEEISAQNVRNTNMPMDTFVKKVTELNLYLVLLPLDGQSVPKLEKPYHSCLPTLSIRHLCQVTANASSAYPKNIEYPRGGGVVVDVPLTDSSSATVEEISQPNPKDGSPGAASAIPETDLPEIAQVIRSCRDGIHKVVELLQHKFPNVSKTQLNRKVREISDFVDNHWKVKKEVLDKLGLDSSPLCSLLVGHGCKFLDKAAVETADDKSRRRPASAWCLCTVKQVEELKCVLRLLPVWASDIVFAAAYTQMTTTFVLQGDTLDPHVGGGFRVPAAALSVFDTLSVMLWVPLYDRLVVPLARRATGHRRGFTQLARMGAGLLVLAVAMLAAGAMEVPQYVVVGASEVFTLIGQIEFFYDQAPDFVWSICSGLSITSFTLGNYVSSALVAVIARATARAGQVDGWIPDDINRAHLDYFWLLTMLCVGNFGVYLLIARWYTYKKTVD

SEQ ID NO: 20976 - protein, 152 aa, Zea mays
  VARIANT 140: note = Ancestral polymorphism is L, Derived polymorphism is R
  VARIANT 130..152: note = Derived polymorphism lacks residues 130 to 152
  VARIANT 110: note = Ancestral polymorphism is D, Derived polymorphism is G
  VARIANT 81: note = Ancestral polymorphism is D, Derived polymorphism is Y
  VARIANT 60: note = Ancestral polymorphism is C, Derived polymorphism is Y
  VARIANT 57: note = Ancestral polymorphism is D, Derived polymorphism is N
  VARIANT 48..152: note = Derived polymorphism lacks residues 48 to 152
  VARIANT 47: note = Ancestral polymorphism is A, Derived polymorphism is T
  VARIANT 46: note = Ancestral polymorphism is D, Derived polymorphism is N
  VARIANT 43: note = Ancestral polymorphism is G, Derived polymorphism is S
  VARIANT 42: note = Ancestral polymorphism is G, Derived polymorphism is D
  VARIANT 40: note = Ancestral polymorphism is R, Derived polymorphism is K
  VARIANT 39: note = Ancestral polymorphism is S, Derived polymorphism is N
  VARIANT 33: note = Ancestral polymorphism is C, Derived polymorphism is Y
  VARIANT 21: note = Ancestral polymorphism is C, Derived polymorphism is Y
  VARIANT 18: note = Ancestral polymorphism is S, Derived polymorphism is N
  VARIANT 16..152: note = Derived polymorphism lacks residues 16 to 152
  VARIANT 15..152: note = Derived polymorphism lacks residues 15 to 152
  VARIANT 13: note = Ancestral polymorphism is Y, Derived polymorphism is C
MSEASPCMMCKTYPQQASTVCKNDFIIIKNRPCKVSFGSRGGSDPDAYAVVLKRKLDLYYATVGKSMVWNLRELFHIDATDYMMSICVDDNLKELSSPRKSGNIFYLSHDECFVTKTLRKTEMKVEEDGSIVKISHEEKRDDYMKFFDSLPG

SEQ ID NO: 20977 - protein, 218 aa, Zea mays
  VARIANT 139: note = Ancestral polymorphism is M, Derived polymorphism is T
  VARIANT 161: note = Ancestral polymorphism is K, Derived polymorphism is T
MDQSAAAPPRQDAAATKKPTTLLDAYEVECIRRELQRLVLKHNQSAAAGGDTAAAALAHGHRRSDDSHLHHQQHRASSGAKKATSAKRVSPSPSSLTPPGPEKGARRGAPLLARHAVAICSGTVPLAAAPAGRRGRRATLICSGTTAAPVASAPVGGGRRKQRADALCSGTTTAPVASATVGGGRGKQRAVALCSGSTTAPVACAGVGVGRHTGRERR

SEQ ID NO: 20978 - protein, 411 aa, Zea mays
  VARIANT 319: note = Ancestral polymorphism is D, Derived polymorphism is Y
MESSSPSVPFPLLQAPVESTYRACTIPYRFPSDNPRKATPVEIQWIDLFLNSVPSFKQRAENDPTVPDAPAKAEKFAQRYTSMLEELKKNPESHGGPPDCILLCRLRELVLRELGFRDIFKKVKDEENAKAMSLFEGVIKRNDEIEDDGKRIENLVRGILAGNIFDLGSAQLAEVFAKDGMSFLASCQNLVSRPWVIDDLDAFKSKWTKKSWEKVAAAFLNLSACHLRRCCTVGALCCPPDVASAPAPCVRLTVHDSQSQAVIFVDNSGADIILGILPFARELLRRGTKVILAANDMPSINDVTYPELVEIINKLKDADGKLSNVDASGLLVANSGNDLPVIDLSSVSPELAFMANDADLVVLEGMGRAIETNLYAQMKCDSIKIGMVKHPEVAQFLGGRLYDCVFKFNEA

SEQ ID NO: 20979 - protein, 289 aa, Zea mays
  VARIANT 205..289: note = Derived polymorphism lacks residues 205 to 289
  VARIANT 81: note = Ancestral polymorphism is G, Derived polymorphism is R
MAEKTIWGDDLVKHLIDVCKEEILARNRPQGIFTRIGWKNVEDKFFARTKKKCTKTQLKNKLDNMKKDFTQFMELKIAATGLGWNEANQTVDCSNTWWDEHLEKCNNPERGTKCNHVRFQKHGPKHLDDLHFLFDKVHVTGATAMCPGDVSSCDSSSDDVLEVTEKTDEASNKPKPKKRKQMSGAAQEKEEKSPFYQMYKNTCMKIESAAEKISTSVEASSAPLQANLVPTIAEAMKMVKACGIQEKTAMMHTTTSLIMKAEFREILFALETNEGRFDLIEREHKKSTT

SEQ ID NO: 20980 - protein, 476 aa, Zea mays
  VARIANT 227: note = Ancestral polymorphism is S, Derived polymorphism is L
  VARIANT 444..476: note = Derived polymorphism lacks residues 444 to 476
MGCRIGVVFSGRQSPGGHNVIWGLYDVVKAHNSNSKIIGFLGGTDGLFAQKTIEITDEALPSYKNQGGYDMLGRTRDQIRTTEQVKATIGTCQALKLDALVIIGGVTSNTDAAQLAETFAQLKCPTKVVGVPVTLNGDLKNQFVETTVGFDTICKYFLVTFGHHNSTSVLTKVNSQLISNACIDALSAEKYYYFIRMMGRKASHVALECALQSHPNMVILGEEVSVSKLTIFDITKQICDAVQARAEKDKYHGVVLIPEGLVESIPELYALLQEIHGLHNKGVSVENISSHLSPWASALFEFLPPFIRKQLLLHPGSDDSAQLSQIEIEKLLAQLVETEMDKRLSMMTVKRWSRGAATSQIGKPAVHMASVDLKGKAYELLRQNSSSFMMEDIYRNPGPLQFEGSGADTKPISLCVEDQDYMGRIKKLQEYLEKVKSIVKPGCSQDVLKAAVSAMASVTEMLTIMSSLSFSGQATI

SEQ ID NO: 20981 - protein, 162 aa, Zea mays
  VARIANT 98: note = Ancestral polymorphism is P, Derived polymorphism is S
  VARIANT 46: note = Ancestral polymorphism is H, Derived polymorphism is N
MLEWYIAVQKDKPSTFCWKQPHNLQCADDLNARFGNGVTRNQVYRHFRSLKEKWGWISHALAKSGYGFDATAKKFNIDLSEKDVTKLGTAKYNYLTRPIKFYHLLEELFANSSQGEGDLAHDQRTVNVPSGSNENEGMKEVENYQMTTEDGGNESSTIARDS

SEQ ID NO: 20982 - protein, 84 aa, Zea mays
  VARIANT 69: note = Ancestral polymorphism is A, Derived polymorphism is V
  VARIANT 58: note = Ancestral polymorphism is A, Derived polymorphism is T
  VARIANT 56: note = Ancestral polymorphism is S, Derived polymorphism is L
  VARIANT 54: note = Ancestral polymorphism is A, Derived polymorphism is T
  VARIANT 53: note = Ancestral polymorphism is N, Derived polymorphism is S
  VARIANT 50: note = Ancestral polymorphism is D, Derived polymorphism is N
  VARIANT 47: note = Ancestral polymorphism is A, Derived polymorphism is T
  VARIANT 36: note = Ancestral polymorphism is E, Derived polymorphism is K
  VARIANT 29: note = Ancestral polymorphism is A, Derived polymorphism is S
  VARIANT 27: note = Ancestral polymorphism is C, Derived polymorphism is Y
  VARIANT 26: note = Ancestral polymorphism is A, Derived polymorphism is T
  VARIANT 23: note = Ancestral polymorphism is S, Derived polymorphism is F
  VARIANT 20: note = Ancestral polymorphism is S, Derived polymorphism is L
  VARIANT 15: note = Ancestral polymorphism is V, Derived polymorphism is I
  VARIANT 14: note = Ancestral polymorphism is N, Derived polymorphism is I
  VARIANT 11: note = Ancestral polymorphism is V, Derived polymorphism is A
  VARIANT 4: note = Ancestral polymorphism is Q, Derived polymorphism is H
MTSQGPASNEVLVIVFQRLSPRSVTACRAVCLRWSELLSSLCLEFLADVDDGNADSSACFAGLGGGRGAFIDVSLAWFVTNMEK

SEQ ID NO: 20983 - protein, 230 aa, Zea mays
  VARIANT 212..230: note = Derived polymorphism lacks residues 212 to 230
  VARIANT 185: note = Ancestral polymorphism is F, Derived polymorphism is S
  VARIANT 177: note = Ancestral polymorphism is T, Derived polymorphism is I
  VARIANT 174: note = Ancestral polymorphism is G, Derived polymorphism is D
  VARIANT 164: note = Ancestral polymorphism is P, Derived polymorphism is L
  VARIANT 153: note = Ancestral polymorphism is G, Derived polymorphism is R
  VARIANT 124: note = Ancestral polymorphism is N, Derived polymorphism is I
  VARIANT 122: note = Ancestral polymorphism is T, Derived polymorphism is I
  VARIANT 103..230: note = Derived polymorphism lacks residues 103 to 230
  VARIANT 73: note = Ancestral polymorphism is G, Derived polymorphism is W
  VARIANT 61: note = Ancestral polymorphism is F, Derived polymorphism is L
  VARIANT 55: note = Ancestral polymorphism is N, Derived polymorphism is S
  VARIANT 8..230: note = Derived polymorphism lacks residues 8 to 230
  VARIANT 6: note = Ancestral polymorphism is N, Derived polymorphism is S
MCMGLNGWNKSSSMLSVKAPVFRITFSCPVGRGLVEYQKELLGKDSTDIDIALDNMTGQNFCEKVNEYSKLIWEQQKGIGVIQCNPDQSKHLETARMLILDIWIDFVNLRSETYTENNRIPTMNYIITIKTHVDSTTLATALRDSDLIFITAGMGGGSRSGAAPVVAQISKEAGYLTVGVITYPFSFEGPCLSIYGVQIQKHAISRTSHPFWSLDARLTELQNVKLAAER

SEQ ID NO: 20984 - protein, 348 aa, Zea mays
  VARIANT 251: note = Ancestral polymorphism is S, Derived polymorphism is L
  VARIANT 272: note = Ancestral polymorphism is F, Derived polymorphism is S
  VARIANT 276: note = Ancestral polymorphism is I, Derived polymorphism is N
MGADGGLNRAAEKPRDGEGGEARVFRCTDYSLPRTTLALALWLGGIHFNVLLVLASLFLLSGRAAAIVVAFQLLFMFAPVNDRDKWGQSVARFICRHAMGYFPITLHVEDYKSLDPSRAYGMLPKTCFSIHGCCSHRIHYPIHKCPRESRKYQLQLLSVKGRESFICRVGLSALADLVGFLPLTKIKVLASSAVFYTPFLRQIWTWLGLVPATRKNFYCYLGAGYSCIVVPGGVREMLHMNNDSEVAFLKSRKGFVKIAIQSGCPLVPVFCFGQIIFHGLLTFECSTPFPFPKPMHVVVGKPIEVNKIPHPTIDEINEVHEQFIIAMRDLFEKYKAKAGYPGLHLRVL

SEQ ID NO: 20985 - protein, 306 aa, Zea mays
  VARIANT 149: note = Ancestral polymorphism is G, Derived polymorphism is D
MDPGGGGGAASHYLELLRAQQQQLLQQHQQAPLSPSSHVKMERSAPSPENVDPGGDQPASEGSGGSGGPTRKPRGRPLGSKNKPKPPIIITRDSPNALHSHLLEVAAGADIVECVSEYARRRCRGVCVLSGGGAVSNLALRQPGADPPGSLLATLRGQFEILSLTGTVLPPPAPPGASNLSVYVAGGQGQVMGGSVAGQLIAAGPVVLMAASFANAVYERLPLEEEEEEAATAAAAAAAVTETQGAAVEPAEGQQQEASQSSGVTGGDVGGIGHGMSLYDLGGNAAGYELPGENFGTWSGGIRPPF

SEQ ID NO: 20986 - protein, 135 aa, Zea mays
  VARIANT 48..135: note = Derived polymorphism lacks residues 48 to 135
MEDHHTDRRISKEAGEETKLTRSFRYEDYSTRRVFLRSYPLQWDWSPSRDDDDDDKQDGQDAADGDECCGSRRWKSKMVAAVTEWGEDKLLLLRRAKKRLALYLIGCHHHGRRALPFPSASPAGSCTVAMMLASR

SEQ ID NO: 20987 - protein, 176 aa, Zea mays
  VARIANT 8: note = Ancestral polymorphism is A, Derived polymorphism is T
MEDQSWKTYFSHQPPPKPTLSKIISDLRKRELVRPTFVCLQCAKESNSQQAMASHCKQHVQAGMAKGTVEHIKYYPDHTYFFLCSDAQPSSSSSVDGVLPQAEPLNQTKQVPWPSYTTVFAYAGNPFMSHLASLVRDNRNRVTPSTTPIGNVPDIDLALRLGSAPSTSDGSTTFNK

SEQ ID NO: 20988 - protein, 150 aa, Zea mays
  VARIANT 60: note = Ancestral polymorphism is M, Derived polymorphism is L
  VARIANT 91: note = Ancestral polymorphism is P, Derived polymorphism is S
  VARIANT 92: note = Ancestral polymorphism is S, Derived polymorphism is N
MAAKMLALFALLALCASATSATHIPGHLPPVMPLGTMNPCMQYCMMQQGLASLMACPSLMLQQLLALPLQTMPVMMPQMMTPNMMSPLMMPSMMSPMVLPSMMSQMMMPQCHCDAVSQIMLQQQLPFMFNPMAMTIPPMFLQQPFVGAAF

SEQ ID NO: 20989 - protein, 352 aa, Zea mays
  VARIANT 2: note = Ancestral polymorphism is P, Derived polymorphism is T
MPGIHRYTAELLVLLTIITRLLLLATAWPALPAPASLEPSLLFPSAGATSPTQTQSAGVASTIPAFPEQSEAAAAAATSVCQLTPSPPLLPAVLASCNANAGGSGVTLPPRLRCCPALAAWLYTAYAPTALSGSGVGEASVAASAEAAAVVDLPVLPDDAEECAGAADRALRAAGVALPRPHWGESTGTGNGTAACDVAFCYCGVRLRRPACAAPQGRMARRLERDCALPGLAGCSRCLRALSKLGGRSNATSSAKAKQEHREDCHLMGLTWLLNRNPTRYREAATAVIQALMAADEAGAGHPATCSLPADDELPVAVASSQINGATSASMSSAHGSLLLVVLAAAVIVLSC

SEQ ID NO: 20990 - protein, 215 aa, Zea mays
  VARIANT 145: note = Ancestral polymorphism is A, Derived polymorphism is V
  VARIANT 140: note = Ancestral polymorphism is D, Derived polymorphism is Y
  VARIANT 82: note = Ancestral polymorphism is A, Derived polymorphism is V
MCACEWRAGDRQATTAAEGADEGQPSPIISFPKAPSQVEPQALGAPPPWSSQAFRCNAAALNSRLPGAPPATSYIYLGRLHASFEINGSMSLNLVPPPPLADLAPLQARLLLCHLCPLILKTHYIWRGIQEIMDEEMDEYVIVKAVDCSNQSEVHMLMHATKVHYQCPKRVRVQSDVSERIANGTSVHVKYPIYDQTVYLNDYHKKMLKDQYGKY

SEQ ID NO: 20991 - protein, 654 aa, Zea mays
  VARIANT 43..654: note = Derived polymorphism lacks residues 43 to 654
MAGPEKTVVWFRRDLRIQDNPALAAAAKGGSVLPIFIWCPSDYGQYYPGRCSRWWLKQSLVHLGKSLELLGCPLVLIRAEDSTLAALLECVRSISATRVVYNRLYDPISLVLDNKIKNELPAHGISIQSFNGDLLYEPWDVYDENGQAFTTFNKYWEKCMSLPIEISQYLAPTRLVAAPGLANVRCCSIDDLGLESSKDVESSNALLSRAWSPGWRNAENMLEEFVSYGLLEYSEHGMKVGGSTTSLLSPYLHFGELSVRMIYQLVKMRQVKWQNEGKSEAEESVRLFLRSIGFREYSRYLCFNYPFTHERSFLGNLKHYPWLLDEGRFKSWRQGMTGYPLVDAGMRELWATGWTHNRIRVIVSSFAVKFLQIPWIWGMKYFWDVLLDADLESDILGWQYISGSLPDGHELSRLDNPEVQGQKYDPDGEYVRTWIPELARMPTEWIHSPWAAPNSILQVAGVELGFNYPKPIVELHMARECLDDAISTMWQLDTAAKLAELDGEVVDDNLNNIRNFDIPKVVLNKKLSPSTSSMEHRVLSTNGKDEKSQPTEVKALYKQIIRDDMMNDSNMDDTCSTANLKVTRKRSSSDSAFNVPSCSSSLVMESRIHHNEPSSVLYSGYFQKTADRDGTSKVEDNDSEDSGTSISRPSKKAA

SEQ ID NO: 20992 - protein, 437 aa, Zea mays
  VARIANT 281..437: note = Derived polymorphism lacks residues 281 to 437
MDTRITCRWVKESRIGQVSAGRSMAQRRLLGTAPAPAGDAASHGSGSSPDAMRIMVGVLVTVIVCTLLYCVYCWRWRKRNAIRRSLLDSLWRRSSSDLPLMDLASILAATDNFSKANKLGEGGFGPVYRGVLSGGSEIAVKRLSARSRQGAAEFRNEVELIAKLQHRNLVRLLGWCAEREEKLLVYEYLPNRSLDAFLFDPSKSAQLGWSTRHNVILGIARGLLYLHEDSLLKVVHRDLKASNVLLDHKMSPKISDFGMAKIFEDDSDAINTGRVVGTYGYMAPEFALDGVFSVKSDVFSFGVLLLEILSGQRNGALYLEEHQQSLIQDAWKLWSEDRAAEFMDQSLGRSYSKDEAWRCYHVGLLCVQEDPDVRPTMSNVLLMLISDHTKLPEPAMPPLFARLRNISLLAPPLTTKTESTTSPLSINDVSITMIEPR

SEQ ID NO: 20993 - protein, 316 aa, Zea mays
  VARIANT 99: note = Ancestral polymorphism is P, Derived polymorphism is S
MYEKRADQAAAMAREFHAASPAVTVPASPLPSKNAGGGLANLQWLLRKRANKVQQGRSVTVEQQEAADDCDDECASMFAGATPYNVPVAVAGPTPDDAPGRKRHGEALSRLRSAILAVLARARRGRGRRPLGSCATVTGTIFGRRRGRVHLALQTDPRAPPALMVELAAYSTGALVREMASGLVRLALECEKAPAPPKQTGDHHHQRRPRQQTALVEEATWRAYCNGRKCGYALRRDCGADEWRVLRAVEPVSVGAGVLPDGDNVGTGAAAAGEGDLMYMRAKFERVVGSRDSEAFYMLNPDGGTGPELSIYLLRV

SEQ ID NO: 20994 - protein, 939 aa, Zea mays
  VARIANT 385..939: note = Derived polymorphism lacks residues 385 to 939
  VARIANT 522..939: note = Derived polymorphism lacks residues 522 to 939
MAKKPVEEALLAAADEQESLSVREELKKQLWLAGPMIAGALLQNVIQMISVMYVGHLGELPLAGASMANSFATVTGLSLLLGMASALDTLCGQAFGARQYYLLGIYKQRAMFLLTLVSVPLSVVWFYTGEILLLFGQDPDIAAEAGTYARWMIPLLFAYGLLQCHVRFLQTQNIVVPVMASAGAAAACHVVVCWALVYALGMGSKGAALSNSISYWVNVAVLAVYVRVSSACKETWTGFSTEAFRDALGFFRLAVPSALMVCLEMWSFELIVLLSGLLPNPKLETSVLSISLNTAAFVWMIPFGLSSAISTRVSNELGAGRPRAARLAVRVVVLLSVAEGLGVGLILVCVRYVWGHAYSNVEEVVTYVANMMLVIAVSNFFDGIQCVLSGVARGCGWQKIGACINLGAYYIVGIPSAYLIAFVLRVGGTGLWLGIICGLIVQLLLLAIITLCTNWDSEASIKFRDDDRPLLRAKVPIGVLGLPFLSGLAAGGDAKDLRFDLSTAFPSVPALRLSYRPNEPLQPFALSVRTGSPIRAPFALAAEFNLTSSNPPAFSLLFKPRIGDFAVASSVHSPPTPPPTSTPPPLAIKMVDLTTNSDDHDCEAHGNDLSFAENVFGANVAAATGTNGGGVGALLSGMRLTTRSVLPLWSKASMWFQWGLRVPPEIKATLADNGYGRKAGSLAISKLPLLVMNKIIIEHTPKVPSQSEADKKRKKDTPPAAEDEEFSLMKRQLDKLNAESTMLRRAVEDLSAEIGAGKGNDRKLPTAVPPQQHTLVSKPDRHFHINAKELVDSGTKPASNEASEELKKVLEGRRNCYTNPYVVSWPLNIMKQATTAISFSEVSPFDTILHLLQLMWSFKPCLYMDFGLASAVTTLWTCTDVTHLVHVLLQFRLVWCGKLIRYARAVAAHYVCSVKGLCFDLFIIRGRNRAFNACWRCTM

SEQ ID NO: 20995 - protein, 201 aa, Zea mays
  VARIANT 138..201: note = Derived polymorphism lacks residues 138 to 201
  VARIANT 124..201: note = Derived polymorphism lacks residues 124 to 201
  VARIANT 116: note = Ancestral polymorphism is R, Derived polymorphism is G
MAVVAHAGLPRPRLFLPFSFHGSPIYSSCLSLALPSVAVDYDHGNPWCRPDTPHNGASRGHHPSVSSGWPCVGRARSHEFLIKIRRMENQLEQLIIHNFWAKAFLATIEFPESKFGINRLTFVCLKIFGIGHDEPHVQIYQEPHCQSEAAYFHLSILQSVHYFHTTINKYPNLINQNAIIGLGEAEDRVGLLGTLATLPTH

SEQ ID NO: 20996 - protein, 849 aa, Zea mays
  VARIANT 304..849: note = Derived polymorphism lacks residues 304 to 849
MAPLPPGPEMEVMSGWLWKTALMEVPRKHHSPPKWSVILWMLVTANLWIMCSSSTQKKVLMPGFSASEMDYIDNDGKFLLSNGYVFGFGFATVSVSDSTYYVLAVVHLPTTSIVWSANANSPVSHSDNFVFDKDGNAYLQSGGSTVWTANISGKGATSMQLLDSGNLVVFGKDGSSPLWQSFSHPTDTLLSGQSFIEGMSLLSHSNAQNMTYTLEIKSGDMLLYAGFQLPQPYWSALQDNRVIIDKNGNNNIYSANLSSGSWSFYDQSGLLQSQLVIAQQQGDANTTLAAVLGNDGLINFYMLQSVNGKSALPITVPQDSCDMPAHCKPYSICNSGTGCQCPSALSSYANCDPGVISPCNSKNKFQLVQLDSAVGYVGTRFTLPVPKTNLTGCRNACMGNCSCIAVFFDQTSGNCFLFDQIGSLQQKDGGKSSLASFIKVSSSNGGSGQGGSSDNGRLTIVIVVIIVGTLAVIGVLVYVGFCIYRRSHHTPSQDGGGSSEDDGFLHTISGAPTRFTYRQLQDATNNFSDKLGQGGFGSVYLGTLPDGSRIAVKKLEGMGQGKKEFRSEVTIIGSIHHIHLVKLRGFCAEGAHRLLAYEYMAKGSLDRWIFQRNEDSSLLDWDTRFSIALGTAKGLAYLHHDCESKIIHCDIKPENVLLDDNFLAKVSDFGLAKLMTREQSHVFTTLKGTRGYLAPEWITNYAISEKCDVYSYGMVLLEIISGRKSYDPVEGSEKAHFPSYAFKKLEEGDLRDISDSKLKYKGQDSRIEMAIKVALWCIQEDFYQRPSMSKVVQMLEGVCDVPQPPMSSHIGYRLYANAFKSSSEEGTSSGMSDYNSDALLSAVRLSGPR

SEQ ID NO: 20997 - protein, 171 aa, Zea mays
  VARIANT 69: note = Ancestral polymorphism is G, Derived polymorphism is D
  VARIANT 50: note = Ancestral polymorphism is E, Derived polymorphism is K
  VARIANT 30: note = Ancestral polymorphism is P, Derived polymorphism is S
  VARIANT 9..171: note = Derived polymorphism lacks residues 9 to 171
MIVPPSLIQKMYRVLTLGGQGRGAGEDAPPDSRAGEWDIRFTLSNYSLQEFGNYVSLRGIKGLAFTCLGSMSKWEPVTFQESLSFVKKVKARDYMLYISLLDVLNRNDQIPLQAYSELSLLFQHHEDLLAELSKFRPLPCPNNVYTHGSIWMIIFLMPFLLLSLVLALRSH

SEQ ID NO: 20998 - protein, 284 aa, Zea mays
  VARIANT 8: note = Ancestral polymorphism is T, Derived polymorphism is I
  VARIANT 17: note = Ancestral polymorphism is R, Derived polymorphism is C
  VARIANT 59: note = Ancestral polymorphism is K, Derived polymorphism is M
  VARIANT 196: note = Ancestral polymorphism is W, Derived polymorphism is R
  VARIANT 249: note = Ancestral polymorphism is R, Derived polymorphism is S
MLDALRLTVPSLTALLRSLPSIVGLVLDLFCGKARGSDSVCVPGRPTPPVYPIGPIIVKGQEATEKGERHACLSWLDAQPEQSVVFLCFGSLGAVSAAQMKEIARGLESSGHRFLWVVRSPPEDPTKFFLARPESDLDSLLPEEFLERTSDRGMVVKMWAPQLEVLRHAVTGTFMTHCGWNSVLEAASASVPMLCWSMYAEHRVNKVFVVDEIKAGVVMDGYDEELVSAAEVEKKVRLVMESEEGDKLRERLVLAKEKAAEALADGGPSRVAFEEFLKDLKLSK

SEQ ID NO: 20999 - protein, 212 aa, Zea mays
  VARIANT 142: note = Ancestral polymorphism is D, Derived polymorphism is Y
MAGVKEPIEVKFRLSDGTDIGPSKYDPNTTVAALKEFVLARWPQDKEIAPKTVNDVKLINVGRILENSRTLAESRVPVGEVPGSVITMHVVNKLLVKNMPSQNHRKSDQRSNSQTLRSQTDVDARYCDVDASSNVYIGVHRDQSQVHLAIDSIYSSQPKPRVGVTASHIWLEKLMLAVVFECARSSQGPGKTLKSVWTQGIGCLLFCNVWRQ

SEQ ID NO: 21000 - protein, 116 aa, Zea mays
  VARIANT 68..116: note = Derived polymorphism lacks residues 68 to 116
  VARIANT 65: note = Ancestral polymorphism is C, Derived polymorphism is R
MAAVMPATPTTTTVPLPNYQVSGAGAAAAAPRHGASGSGSVGAFFGVLAAVLVLTVLSCVFGRVCAAQAEGPDESYDCTRLARWRRSAHRRRPVLPAAETKQPAASQPLPLPLPEP

SEQ ID NO: 21001 - protein, 371 aa, Zea mays
  VARIANT 29..371: note = Derived polymorphism lacks residues 29 to 371
MADLAGTTSSVVHAQEIMDEEMDEDVIVKAVDCSNQSEVDIELKQFIKGYSDALQPELGMKLLIAHGSHQELGKGDSMTNLMINMCDVVHMLMHATEVHYQCPKSVRVQSDVSERIANGTSVHVNTPVQNLNLDIEEQSHKHSISHIQEPNTNNSEGSLAGAAVWDVFRRQDLPKLNEYLAVHREECAARCQAVSSVKYPIYDQTVYLNDYHKKMLKDQYGSIANWLACQLNISSVCGVWVLKLVCLVGFIFLEGLKTIEQITMDSASVETNMLKLCKVRSVQFGQKGIPYLNTYDGRTIRYPDPLIKANNTIKIDLETNKIMDFIKFDVGNVVMVTGGRNTGRVGVIKNREKHKGSFETIHVLLGAFCYV

SEQ ID NO: 21002 - protein, 351 aa, Zea mays
  VARIANT 222: note = Ancestral polymorphism is G, Derived polymorphism is R
MAMEPSVDAKNTENNSSEFAVNGHLDQNDSSDSALSNIDDGDNSEDEDGSTNTISSYHVNDFQRLVLACDDGSVRLYNVPESGALTYYRSLPRVSGDGATLESVPDLVKAMYLNVESFPCVRLLNLSGEIGCSRYPMIQNFTRVAGALVESNGVNNDLQELSPDRKFTQDDFAPYSNHNHDWNPAGSEKNEKTGNGYKSIVAEFDLVMQGSVWTSLPPLKNGSTEHLKPLILAIASQDSASFFWDRSLGSDSPISGLIALLTAVDALSHIHGLSKLKKQLVFAVFNGEAWGYLGSRKFLQELDEGAASVNGISSLMIDQALEIGSIGKAILEEYPSFYVHVEGVRIFGSAL

SEQ ID NO: 21003 - protein, 287 aa, Zea mays
  VARIANT 42: note = Ancestral polymorphism is P, Derived polymorphism is L
  VARIANT 59: note = Ancestral polymorphism is S, Derived polymorphism is F
MPMVAASPEKLHCGDAGSGDKEKEVAGRDDAEVMSPQLSDELLREKAQRIQVMLTRGMSERLPDRGKKLLATLDAIHREQDRRQARGDGARAPGNEACERIVRSRCIESSGLHSDLSRVKVSVADFMSSFGADKEAGIKISSLEIKGRSPNKPSTSIENKGKLCEEKDSCEASSQQMNSVHEELHLDTSENMRKTSSDVGASNNGNNVMWEEVPTPSRKSVTEEVVLLDGDTPHPESAKETSNNWDAGKLYYPSREHLCSVEIASDDIRCFQPESLLSSPIMNFYIM

SEQ ID NO: 21004 - protein, 117 aa, Zea mays
  VARIANT 51: note = Ancestral polymorphism is A, Derived polymorphism is G
  VARIANT 70: note = Ancestral polymorphism is A, Derived polymorphism is V
MSSTGGGGRVSRRSHRAVPQSRQICRARRRWAPVYLSTVLEYLVAEVLELAGNAARDNKNRIVMRQIQLAVRNDEELSKLMGTVTIAASGVMPDIHQTLLPKKAGQKGDIGSASQEF

SEQ ID NO: 21005 - protein, 376 aa, Zea mays
  VARIANT 199: note = Ancestral polymorphism is R, Derived polymorphism is C
  VARIANT 179: note = Ancestral polymorphism is G, Derived polymorphism is D
  VARIANT 174: note = Ancestral polymorphism is E, Derived polymorphism is K
  VARIANT 169..376: note = Derived polymorphism lacks residues 169 to 376
  VARIANT 155: note = Ancestral polymorphism is R, Derived polymorphism is H
  VARIANT 118: note = Ancestral polymorphism is A, Derived polymorphism is T
  VARIANT 111: note = Ancestral polymorphism is N, Derived polymorphism is K
  VARIANT 93: note = Ancestral polymorphism is T, Derived polymorphism is I
MAMWRAAARQLVDRALGSRAAHTSTGSKKIVGVFYKAGEYADKNPNFVGCVEGALGIRGWLESQGHQYIVTDDKEGPNCELEKHIEDMHVLITTPFHPAYVTAERIKKAKNLELLLTAGIGSDHIDLPAAAAAGLTVAEVTGSNTVSVAEDELLRILILLRNFLPGYQQVVQGEWNVAGIAHRAYDLEGKTVGTVGAGRIGRLLLQRLKPFNCNLLYHDRLQIDPELEKEIGAKFEEDLDAMLPKCDVIVINTPLTEKTRGMFNKERIAKMKKGVIVVNNARGAIMDAQAVADACSSGHIAGYGGDVWFPQPAPKDHPWRYMPNHAMTPHISGTTIDAQLRYADGVRDMLDRYFKGEDFPVQNYIVKEGQLASQYQ

SEQ ID NO: 21006 - protein, 142 aa, Zea mays
  VARIANT 70: note = Ancestral polymorphism is A, Derived polymorphism is T
  VARIANT 61: note = Ancestral polymorphism is P, Derived polymorphism is R
  VARIANT 49..142: note = Derived polymorphism lacks residues 49 to 142
  VARIANT 36: note = Ancestral polymorphism is W, Derived polymorphism is L
  VARIANT 34: note = Ancestral polymorphism is N, Derived polymorphism is I
  VARIANT 28: note = Ancestral polymorphism is Y, Derived polymorphism is N
  VARIANT 27: note = Ancestral polymorphism is A, Derived polymorphism is S
  VARIANT 24: note = Ancestral polymorphism is N, Derived polymorphism is Y
  VARIANT 9..142: note = Derived polymorphism lacks residues 9 to 142
MLNNDYHVSRGKVCNLAFFLEYKNCIAYGYASFNFWLQEHIFSAGLSEQCCSLKGDFMNMPIADNTFDAAYAIQATCYAPEAVNTLEFLRIAPAGSVGAYNVLTSASDGLLKGGREGIFTASFFVLGRKPLKETEIVNDGNL

SEQ ID NO: 21007 - protein, 258 aa, Zea mays
  VARIANT 84..258: note = Derived polymorphism lacks residues 84 to 258
MFKSPRRQEVIANIAQISKVRGSCCQKMGNRCIFHEKGLAYEQFVFCDIFHQKESGWRDCSFCGKRLHYGCVASKNSYDLLDSGGIQCVTCMKNSAAQSASGQVVPKLFPFPNNLLFFGKSDELLSSRKFGQPPSLMLDSRNDDIAIVNKSNHLFMVSGIEAGQSSNILRQKEIGNGPRQIKWEQPTLNIGDMGRPLLTRSQSALESPQCTRRDDNKDPTTDSTTSESFPEACLSMNLGIANNGNRMEATSIVERPMI

SEQ ID NO: 21008 - protein, 278 aa, Zea mays
  VARIANT 118: note = Ancestral polymorphism is P, Derived polymorphism is T
  VARIANT 80: note = Ancestral polymorphism is G, Derived polymorphism is E
MGRVKLQIKRIENNTNRQVTFSKRRNGLIKKAYELSVLCDIDIALIMFSPSNRLSHFSGRRRIEDVITRYINLPEHERGGGGGGKGPANSNIEDLQHEIRNYRHQVEELEKQIRMFEPDPAVLVLTNEAETCEKFLMDTLTRVEERMKYLSCNQLGPFEPSPTDIHDVFGVSQQQQQQGDLSAFGAGDVVSYFAGGMAASDIFSGVGPMSSFSEQTIFDSMRPDPAVMAGLDPGIATICTVDQQPPSLNWEDAYASAGLLSALIPSTPFPLDEDQQAS

SEQ ID NO: 21009 - protein, 287 aa, Zea mays
  VARIANT 218: note = Ancestral polymorphism is L, Derived polymorphism is P
  VARIANT 215: note = Ancestral polymorphism is L, Derived polymorphism is P
  VARIANT 214: note = Ancestral polymorphism is H, Derived polymorphism is P
  VARIANT 156..287: note = Derived polymorphism lacks residues 156 to 287
  VARIANT 139..287: note = Derived polymorphism lacks residues 139 to 287
  VARIANT 58: note = Ancestral polymorphism is R, Derived polymorphism is L
  VARIANT 40: note = Ancestral polymorphism is A, Derived polymorphism is T
  VARIANT 39: note = Ancestral polymorphism is A, Derived polymorphism is V
MEAGLPPRPPPPPQALVAHCVFQINTKVSELRRLERELAAVAVGGDARVVRERIHRARADVTRLARNAARRLADPAAAAAVMSKLATDFQAALRVFLLVHGRIIEDDRHEATAAARRAPTMFRFRPRSPPSYGSRIGSQLTNANTNANATAGADQQCDIQIQQQHLVESRRMQELALLDNDIAFSEALIEERKLEIRKIQRDMDIAEINEIFVHLAKLVHDQQGAIDIVESNMEKATMDTSKAKEQLSRVALTHETDSAMKCSLTTVFGLVKLIFACVLELYYFDDD

SEQ ID NO: 21010 - protein, 222 aa, Zea mays
  VARIANT 210: note = Ancestral polymorphism is K, Derived polymorphism is N
  VARIANT 126: note = Ancestral polymorphism is S, Derived polymorphism is Y
  VARIANT 98..222: note = Derived polymorphism lacks residues 98 to 222
  VARIANT 71: note = Ancestral polymorphism is F, Derived polymorphism is L
  VARIANT 68: note = Ancestral polymorphism is D, Derived polymorphism is N
  VARIANT 52: note = Ancestral polymorphism is G, Derived polymorphism is R
MAAPTPTTTTRRDYRLRPRCFSSPRSCPMAKRLAGIDKEVLVEVVRFTHKSGLRGCDGGWKDFLARNDRKFGASVSDPRKRSRDVLFAFLQTFPKDFQKIIGITSVSLLPVKEPGRFYVDSYMGISRGINALAAALCMNVYVVGLNKVNKPTLPLASGEFSVPTPVLLVVAFLVMVSGHGLLASTLWQRAQQFDIENKDCITQFYMFIWKLFYAEYFLIPFV

SEQ ID NO: 21011 - protein, 419 aa, Zea mays
  VARIANT 137: note = Ancestral polymorphism is L, Derived polymorphism is H
MGQSIQNVCLANNATFLSALLLLAVTTSGGPSLQCCLARSETHRRPPPTPPDGPHHPPAAPAFADAWSAACAAEASTVLVPASYVFLVGPIAFTGGDSCEPNVVFQVDGTILANTGSTAWRSGYATQWLEFKSVRGLTIQGCGVIDGQGSHWWSRNPLVDQGQTTTALRVYQGDNVTVTGITIRSSPKFHLTLDTCRAVEVHGVTIASPGDSPNTDGIHLASSVGVSIHHTTIACGDDCVSIQAGCSDVSIRNVYCGPGHGISVGGLGKGGATATVSDVTVQDVTFNHTMTGVRIKTWQGGSGSVKNVRFSGVRVSAVKTPIVIDQYYCDHTACTNQTSAVAVVGAAYQGVAGTYTQRPVYLACSDAAPCSGIHLADIQLQPVKDSGYRVQGPFCWKAHGDEMRPVEPPVDCLITAGAP

SEQ ID NO: 21012 - protein, 286 aa, Zea mays
  VARIANT 77: note = Ancestral polymorphism is D, Derived polymorphism is V
  VARIANT 103: note = Ancestral polymorphism is A, Derived polymorphism is T
  VARIANT 105: note = Ancestral polymorphism is R, Derived polymorphism is H
  VARIANT 122: note = Ancestral polymorphism is P, Derived polymorphism is T
  VARIANT 144: note = Ancestral polymorphism is I, Derived polymorphism is N
  VARIANT 161..286: note = Derived polymorphism lacks residues 161 to 286
  VARIANT 190: note = Ancestral polymorphism is G, Derived polymorphism is C
  VARIANT 214..286: note = Derived polymorphism lacks residues 214 to 286
  VARIANT 221: note = Ancestral polymorphism is C, Derived polymorphism is Y
  VARIANT 225..286: note = Derived polymorphism lacks residues 225 to 286
MNMSLCEQISRSKALASSRPLNIARQAVASKFLLLVSFGLKLTEEKMTASLKYLFFLKDGLDGVHDEAFSHMVWYSDNCWLLSTHFIRVHLKEIENCLLVKEAYRLFPNSFPLMSGSTNVAPRYLATTTTSVICRYELGNGVPIVSLFYQNNVMLELLFAYAKKDDPLGLQHLALCHARYRPNDNAVEYGDDRNYLCRNRFNKYFDDAWVEQTWWANNCDCVVVQHEHPPRDVDYDDEDLAAPVTPCQSKDDEHQRDQASDDQGTTAGLPLFLASTHPPPPLTARE

SEQ ID NO: 21013 - protein, 430 aa, Zea mays
  VARIANT 304: note = Ancestral polymorphism is H, Derived polymorphism is Y
MASCGSFYFVPLLLLMLLLASPATAALVTSSQPGGNATAARPRPGMEQLKRKRIRALLTKLNKPALKTIQSSDGDIIDCVPSHLQPAFDHPKLRGEKILDPPERPKNRNFTFGGSGRSRVGEVVVQAWHATGEACPEGTVPIRRTTEKDLLRASSLRRYGRKPARRGVRRDSTSSGHEHAVGYVNSEQYYGAKASVNVWSPRIGDPSEFSLSQIWVLSGSFGNDLNTIEAGWQVSPELYGDSNPRFFTYWTTDAYQETGCYNHNCRGFVQTTNKIAIGAAITPESVYNGRQFDITLMLWKWCAHQDPKHGHWWLELGPGLVVGYWPSHLFSHLARHANMVQFGGEVVNTRPSGSHTATQMGSGHFPREGFDRAAYFRNLQVVDWDNNLIPAANLKLLADHPGCYDIQGGTNSYWGSYFYYGGPGRNAKCP

SEQ ID NO: 21014 - protein, 54 aa, Zea mays
  VARIANT 45: note = Ancestral polymorphism is G, Derived polymorphism is D
  VARIANT 39: note = Ancestral polymorphism is R, Derived polymorphism is C
  VARIANT 29: note = Ancestral polymorphism is Q, Derived polymorphism is L
  VARIANT 25: note = Ancestral polymorphism is D, Derived polymorphism is N
MASAATQVGTYFLRNYYNLLQQTPDVVHQFYIEASTMVRVDDLTGTTAAANNMM

SEQ ID NO: 21015 - protein, 67 aa, Zea mays
  VARIANT 10: note = Ancestral polymorphism is A, Derived polymorphism is T
MISPDTIRKTIGVIGNGTALVLFLSPSVIINSSICVSLYSKKQKKVLKTCNNIIIVLVRVHRYIQFV

SEQ ID NO: 21016 - protein, 366 aa, Zea mays
  VARIANT 121: note = Ancestral polymorphism is L, Derived polymorphism is R
MADAADSSMALVHSSLADSVLTSPRTLRQGQKWEVEYARYFGTPRRDPTAAPPSGLRYIMRGVHRHQGTWIPASCPASLCVCHPSLPSAVPVLTISIGDVVFVRTQTPSLQLFILILESCLEEHFVSILNFSWPQVTCVTQCPIRGSRVVFVSFCDKFKQIQKFAVRFPQPCDAESFLSCVECSCGSSGTMDIIPFGSDYVCEDSSASEYIVSNGLHHRLDDASNLEEQCFDHTIDEPPMNYHEETDQHVLEPLSASNTSNNSAFPPSFNQMLKSCSIDYDQEEPCPLAASNHVLQEVYVLDTSHDVANEERTAGKGMDAAEGVDASILTYDLMARIKTYMADESFNDMLLKLDKAIDELGGDMSL

SEQ ID NO: 21017 - protein, 89 aa, Zea mays
  VARIANT 81: note = Ancestral polymorphism is R, Derived polymorphism is C
  VARIANT 71: note = Ancestral polymorphism is D, Derived polymorphism is N
  VARIANT 67: note = Ancestral polymorphism is L, Derived polymorphism is F
  VARIANT 37: note = Ancestral polymorphism is L, Derived polymorphism is P
  VARIANT 30..89: note = Derived polymorphism lacks residues 30 to 89
  VARIANT 26: note = Ancestral polymorphism is R, Derived polymorphism is C
  VARIANT 15: note = Ancestral polymorphism is P, Derived polymorphism is H
  VARIANT 3: note = Ancestral polymorphism is T, Derived polymorphism is I
MKTEASLAAGDIEEPLVHFKWWYMVRLIQWHLTEELLVPSVLIEWLSNQLQERDSVDVLELLLPIMLGLVDTISLSQTYVRMFVRIFLL

SEQ ID NO: 21018 - protein, 326 aa, Zea mays
  VARIANT 272: note = Ancestral polymorphism is S, Derived polymorphism is Y
  VARIANT 175: note = Ancestral polymorphism is L, Derived polymorphism is I
  VARIANT 121: note = Ancestral polymorphism is E, Derived polymorphism is K
  VARIANT 76..326: note = Derived polymorphism lacks residues 76 to 326
MQMIFHYFFLQEFKLIESVELAPLRKLIDPLTGVQIDRKRRSGSSQGADRSPDSALGKHKNENHSGGSESTEHILQMLRQLPTKNISDKISHDEITDDSISNVNNSFADRKALHLAIHSSEKVRKAVVSGVKGLLSSCSSTLKRTKMLLLECLCVLACDDAAAVSEATQDALDHLFNQGHNLVTENEISDTFTRLVERLPQVVIAARFFDCLGLCIGHSSQFSGSMDKLIVSKPLSIGYLYSVAELNSGAYSKDTTNISLHATSTSAASKISVIHDNALPIALLGTVEYELPHMPPWFFHAGSQKLYGVLAGIIRLVGLSTMSGTL

SEQ ID NO: 21019 - protein, 145 aa, Zea mays
  VARIANT 11: note = Ancestral polymorphism is W, Derived polymorphism is S
  VARIANT 13: note = Ancestral polymorphism is G, Derived polymorphism is S
  VARIANT 17: note = Ancestral polymorphism is A, Derived polymorphism is V
  VARIANT 61: note = Ancestral polymorphism is D, Derived polymorphism is A
  VARIANT 96: note = Ancestral polymorphism is R, Derived polymorphism is C
MASLTELSFNWTGFINAMISNISFTYMSIYSKKAMFEGPQLMQHGFSDAIAKVGLTKFVSDLFLVGLFYHLYNQIATNTLERVAPLTHAVGNVLKRVFAIGFSIIVFGNKISTQTGIGTSIAIAGVAMYSYIKAKIEEEKRKKSA

SEQ ID NO: 21020 - protein, 295 aa, Zea mays
  VARIANT 2: note = Ancestral polymorphism is R, Derived polymorphism is Q
  VARIANT 25: note = Ancestral polymorphism is V, Derived polymorphism is I
  VARIANT 83: note = Ancestral polymorphism is K, Derived polymorphism is N
  VARIANT 115: note = Ancestral polymorphism is G, Derived polymorphism is R
  VARIANT 211: note = Ancestral polymorphism is K, Derived polymorphism is M
MRKAKALYGIAAAVALMAVLELRLVGANFVSDCDITWEPKNAKTDEGGNHLTLSLVSNSSGSMLRTKKQFIYGSVSTRMKLVKGNSAGTVTTYYTSSIGDNHDEIDFEFLGNETGKPYTIHTNVFADGIGQKEMQFRPWFDPTADYHNYTIFWNQCMIVWLIDGIPIRVFRNHSAQGVPFPTRRQMYAFSSIWAAEDWATQGGRVKTDWTKAPFVAEYRDINLRVCDCAFYGAAGCPDSCASSSNWYAAPDLCQLTKEQLRQMRAVQLGYTIYDYCADGKRYNGTVPPECSMPQY

SEQ ID NO: 21021 - protein, 79 aa, Zea mays
  VARIANT 20..79: note = Derived polymorphism lacks residues 20 to 79
MVGFEVDDASRNMPHSPRTKGIIQHFIRLLKTHTEGLDNDLQVTNEKMGQLEATQIDTNTKLANVEVTVAHIDKSLSHS

SEQ ID NO: 21022 - protein, 349 aa, Zea mays
  VARIANT 185..349: note = Derived polymorphism lacks residues 185 to 349
  VARIANT 130..349: note = Derived polymorphism lacks residues 130 to 349
  VARIANT 89: note = Ancestral polymorphism is L, Derived polymorphism is R
  VARIANT 88..349: note = Derived polymorphism lacks residues 88 to 349
  VARIANT 66: note = Ancestral polymorphism is P, Derived polymorphism is L
MATTDLYTGQLSFSSSSSSDQELMKALEPFIRSASSPTSSTTSPFSYSSYSYPYSSVLPQDSYYLPATSSYTALPPPPLAPTATSFSQLPPLPQSSSSYASPASSSCPTSSVDAASGLALNHLGPAQIHQIHSQLLAQRRQQHQRGQLAAAFLGPQAQPMKHAGAPPLAAAKLYRGVRQRHWGKWVAEIRLPRNRTRLWLGTFDSAEDAALAYDKAAFRLRGDAARLNFPSLRRGGAHLAGPLDASVDAKLTAICQGITAEPTSKAAAAAPSDSPKASASTTTTEGDESVHSAGSPPSLPTFPQQQQQVTPPLPEMASLDFTEAPWDESAALHLNSYPSWDIDWDSILS

SEQ ID NO: 21023 - protein, 108 aa, Zea mays
  VARIANT 89..108: note = Derived polymorphism lacks residues 89 to 108
  VARIANT 70..108: note = Derived polymorphism lacks residues 70 to 108
  VARIANT 60: note = Ancestral polymorphism is V, Derived polymorphism is M
  VARIANT 46: note = Ancestral polymorphism is T, Derived polymorphism is N
  VARIANT 36: note = Ancestral polymorphism is G, Derived polymorphism is V
  VARIANT 34: note = Ancestral polymorphism is V, Derived polymorphism is I
  VARIANT 25: note = Ancestral polymorphism is K, Derived polymorphism is N
  VARIANT 20: note = Ancestral polymorphism is A, Derived polymorphism is D
  VARIANT 19: note = Ancestral polymorphism is A, Derived polymorphism is V
  VARIANT 18: note = Ancestral polymorphism is T, Derived polymorphism is M
  VARIANT 14: note = Ancestral polymorphism is R, Derived polymorphism is C
  VARIANT 12: note = Ancestral polymorphism is G, Derived polymorphism is R
  VARIANT 8: note = Ancestral polymorphism is A, Derived polymorphism is T
MGSVVAFAKLDGERYPKTAATVGVKGFPTVLLFVNGTEHAYHGLHTKDAIVTWVRKKTGVPIIRLQSKDSAEEFLKKDMTFVIALFTNLEVLMRYEMLDAEKCIVFKF

SEQ ID NO: 21024 - protein, 212 aa, Zea mays
  VARIANT 82..212: note = Derived polymorphism lacks residues 82 to 212
  VARIANT 172..212: note = Derived polymorphism lacks residues 172 to 212
MPPPSPQRCCSLPNDVALLSSLNPIPYGCGRGRERSKRIRVMQMESVEFVAPTLEELLPELSLKEQPRLQNQSHERDRIRKRHNKHSPPPRPSLISVRYVMEMGSIGMDFVAPALEVLLPDLSSEEQLRLQNKAHGHDRILKPHNKHAPRPRPSPFSEWYVRDQCNFFKIPQVLHALAHYNARHPGGEFDVVKPLKQSRVGFRGQAWFHINF

SEQ ID NO: 21025 - protein, 674 aa, Zea mays
  VARIANT 42..674: note = Derived polymorphism lacks residues 42 to 674
MAGAAAHQTTSHADDGSPEWSVAVPAAAAGHENTKSSRRACCTRALVVCLFSWLAAPMVSLATSSCLWLFSLAAAARDRVVGVARMAWRIGADDPRKVAHGFKMALALTLCSVFYYVKPLYDFTGQNAMWAVLTVVVVFEYTVGGCLYKGLNRAMATMTGAALALGVQWIASLSDKELEPFILSGSLFVFAAAATYSRFLPTMKARFDYGVTIFILTYTLVAVGGYRVNEVAFMARHRLTTIAIGAVICFAVCALVFPVWAGQELHNQVARNMDKLASAVESCVEDYFSEAAGVDVVAGAVPKPALSDKSHGYKAVLNAKASEDSLANLATWEPAHGRFGFRHPYHLYQKVGAEMRSCAYCVDALSACVVSEAQTPAHVKKHLAGASAALGRHCSAMLREASGSVASMTRSGRLALVVGDMNAAALELRDELRFLAPLLEEDESTDTEQEQNITMSPAPAPSLIEALPLFTAASLLLEICTRAEGVVSAVDNLAIIARFNKADHGEETGHDVETAVPTTMSTMLTADVPQETVAVDHGKTETPTDESSADQTPRDQVGELLKVLMRRRSTKKWARGDTKVCPKPPLDFVVHAPSPRSRSMELTVAGHAPVAPSPRHRSVELTSHPPVAPSPRNRSVDFGSHGPVLPSPRNRSMDFGKHGAVLPSPSHRSILGMA

SEQ ID NO: 21026 - protein, 99 aa, Zea mays
  VARIANT 36: note = Ancestral polymorphism is A, Derived polymorphism is V
MAMEAETTVLRRPLSAFLAAGGGGIGEEVSSGRQQVPPVFLATEKDDDRPAVDPVIWADEKRMKRELLVWAKAVASMVASNNTSCSSPPSSWSSTRHRG

SEQ ID NO: 21027 - protein, 90 aa, Zea mays
  VARIANT 65: note = Ancestral polymorphism is T, Derived polymorphism is N
MNRVRLCIFGQCRLILLVFFFLCVLSSQEVRLGEEIAWYADGDTIVRGEQNHSIAYAYDRVFGPTTTTRHVYDAAALHVISGAMEGIYGI

SEQ ID NO: 21028 - protein, 667 aa, Zea mays
  VARIANT 296..667: note = Ancestral polymorphism lacks residues 296 to 667
MDRSRSKRGYHYDQDSPPPRSKQRFDRRSGGGQNANSSYHRRGPLGGGGSDRRGFLPPAPAPPPPPPPPPLPPSSATAGGGAGPTTTTTSFRILCPECKAYGFPPGFVAKVRDDSGALVTVHPPFAGDYVRVIETVDGARREADGRPPMFSPAQEALLMVHRRILETDADDGDEDGEYGPRGKDSRDRGKTTTRLIVPKMHVGCLLGKGGKIIEQMRMETKTHIRILPRDQHTPRCVSLSEEVVQVVGDGNCVKKAVAIITDRLKESLHRDRGPFRGRMNSPEPRISQEDDYLGVSQMPAYEESLGRSDQIRNNTSMEPPGYEFDSNDGKVIEHPDILYDDIIFRILCPNDKVDNLVATNDGILEMLQADVGVDVRLSDIIAGSDERVVIITSREGPDHELFPAQEAVLHIQTHIVDLGPDKDNIITTRLLVPSSEIACFDGREGSLSDIQRQTSANVQILPKEDLPLCALESDELIQIVGEISAARNALIQVTTKLRSFLYREMSGPIQVGNINVHGAISPVAGSPGGPNLGNDMPMSAYHQASQLATSWHSKDSGGSASGSFDQGSNIIDEIRQGATKRFAVPLVTRSTLEVVIPNSAVASLTMRAGSKLAQISEISGATVTLAEDRPDILEKVVRISGTPEQASKAENLLQGFILSIPDDIPSG

SEQ ID NO: 21029 - protein, 236 aa, Zea mays
  VARIANT 155..236: note = Derived polymorphism lacks residues 155 to 236
  VARIANT 102..236: note = Derived polymorphism lacks residues 102 to 236
  VARIANT 67: note = Ancestral polymorphism is S, Derived polymorphism is N
  VARIANT 62: note = Ancestral polymorphism is R, Derived polymorphism is M
MQAQGAGQASSAASRQAGVAQAAGQASSATSRRMGPGATRDQQPASSAGVARQSMRGTQDIRLIVDSKRLGFLNQAGSAFNRGIMFNGVVKIYAVMSVHQIRSVCVLWQHDGLTSEQMDKPSPTQNERGSMSCMEKYRGIAPKKSLVSKDHEHAYFDSADWVDLSMIIKRKKTICTNQFIMPVCTNRFIMYACTNQFYNVDARKNSELKERTQQFLPLQQLHSMFSNKDTTPRRTM

SEQ ID NO: 21030 - protein, 312 aa, Zea mays
  VARIANT 25..312: note = Derived polymorphism lacks residues 25 to 312
  VARIANT 133: note = Ancestral polymorphism is L, Derived polymorphism is R
MHCIAPRLLLLPLPTASRHALSPTQTPPLPPLLPSRACKFHLASARSPSHAAASVFGDDEDEMARACRAAAAARPCAFSPATTRSRPPPPARTASSLGLGVPNPPPRPPNACPRPLPTLIYLSLPLPLPFLLLPVAALLLLPQEYSPSIVARACDFVPHADLFAVFAAVFCWIGFVWIASEIGSTLLRVSHFMDGGSCGLEGASVVTSTTSAGIQLLPEKHYADEACGAMAGSNGPEGMPVLTSADDPPTRADIPFLCNSVDETCEATGDGSAPLDAQICTGFSKLISLEVKKGLQKCATFPPSSGQPQQED

SEQ ID NO: 21031 - protein, 373 aa, Zea mays
  VARIANT 301: note = Ancestral polymorphism is V, Derived polymorphism is L
  VARIANT 6: note = Ancestral polymorphism is G, Derived polymorphism is D
MAKGVGGGDPIPLSRFGALVAQLESVVASARQKTPDALLCFDLLSELSSAIDEAPKETIQLWQRKCEDALQSLLVLGTRRPVRRLASSAMGRIIEKGDVISVYSRASNLQGWLVDVKRAEATACAALDNFQTGAAQCLGEIYRLFGRKITAGLIETSSIVAKLMKYHEDFVRQDALLLLENALEGSGGGGAAAAYQEAFRIIMRGVSDKSFIVRAAAARCLKAFANIGGPALGMADFDSSMSYCVKGLEDSVSSVRDSFAEALGAILALAVNPDAQVKKGGKKQTASAKKIEDGVQKHLIVPFVKANGANAKELRIGLTLSWVFFLHMIHMKYGTPDSELQNYAIQTMEILQGNDSLDPHALVSSVALRFVNP

SEQ ID NO: 21032 - protein, 2179 aa, Zea mays
  VARIANT 294: note = Ancestral polymorphism is V, Derived polymorphism is L
  VARIANT 6: note = Ancestral polymorphism is G, Derived polymorphism is D
MAKGVGGGDPIPLSRFGALVAQLESVVASARQKTPDALLCFDLLSELSSAIDEAPKETIQLWQRKCEDALQSLLVLGTRRPVRRLASSAMGRIIEKGDVISVYSRASNLQGWLVDVKRAEATACAGAAQCLGEIYRLFGRKITAGLIETSSIVAKLMKYHEDFVRQDALLLLENALEGSGGGGAAAAYQEAFRIIMRGVSDKSFIVRAAAARCLKAFANIGGPALGMADFDSSMSYCVKGLEDSVSSVRDSFAEALGAILALAVNPDAQVKKGGKKQTASAKKIEDGVQKHLIVPFVKANGANAKELRIGLTLSWVFFLHMIHMKYGTPDSELQNYAIQTMEILQGNDSLDPHALACVLYVLRVGVADQMTELTQRDFLLFLGRKLESLNYTAATRVATLRILCYLLRSVGEVPAEFKDVLDNTVVAALSHSSAHVRVEAALTLRALAEVDPTCVGGLVSYGLTTLQALRETVSFDKGKSLNLELDSLHGQATVLAALVAISPKLLLGYPARLPKSVLELSKKMLNGFSRNPVAAIAEREAGWLLLASLLASMPKEELEDQVFDVLLLWAGPFTGNPESYLRHIQDWASELRVLSVAVEALTAFIRSFVYPSITTTDCGILLNPVLAYLGGALSLISSLRSKQVPNVRSALDLLTTRTLMAYWSLSNPVVYKTEHQQILQLCSSPFSDPSGWEESSCLKFLLDKRDASLGPWIPGRDSFEDELRAFDGGADGFLPCVWDDEISNFPQPESIRKMLVNQMLLCYGSIFACQENTVKISLLNNLDQCLKSGKKYLWFKFLITNACVALLSGLKEFLALRGAQSLPIDILSMIQSIFKAILVEPEISTAQRRAACEGLGLLARAGNDIFTARMARSLLGELVTTTDLSYTTSVAFSLGCIHRSAGGMALSTLVTPTVSSLSHLSKSSNFNLQLWSLHALLLTIEAAGLSYVSQVQGTLFLAMEILLLEENGYVDLRQGIGHLINAIVAVIGPELAPDSTFFSRCKSVIAEISSSNEMATLLESVRFSQQLVLFAPQAVPVHLHVQGLIPMLYSRQPSLRYLAVSTLHHLIERDPAAMIDENIEENLFSMLDEETDSETAMLVRATIIRLLYTSCPVCPSRWLAVLRNIVLATSIRRNTGEVLSCFGHNPPDSTSENDVYYGEDEDNMISSSKQQQIRCAGSISSQFPPRNKHLRYRTRVFAAECVSHVPIAVGAEPAHFDLLLARSAISQGTYLSNDWLVLKLQELVSLSYQISTGQFEGMQPIGVKLLCLIMDKFGKAVDPEFPGHILLEQFQAQLVSAVRMAISTASGPLLLEAGLELATRVMTSSIIGGDRLALSRLFSLITRPLSDIEGLLYPSFADWVVCKIKVRLLTAHAAVKCNTYQFLRMRENAPNEYQQLAPSLVNSSTLLGKYWIRALKDYVSISFGLHSKINYKPFLDGIQSLLVLSKVQRYLDEVWLLILKATALDAAPLDFDENNPKNLLEQTFISGHCMVKLDRTEFQFLWGLSILVLFHSCQSMKNNSLKINLDFKQDKNFGEFIVHGLDDKRPCDQVLRVLSSLTTEVFFSNNFISVDICQQLLQALTYADCSSAPIIHLFTQIIRFCPDNFFEVEAFVFSAIELLSQYLGLILQCRDGSSQNNSSNTLISELSIASETMAYRIKGEYLWKLVMLVVSTSHQSFQQVSTNLCFSNIICFLQNIFPFMRKIFRERVESDGECTSPKVVFGAMVGLVGYFYVECDKKISLLENKISDSYKLLNKILLFCLGEATALAKLVPEIIYRSENVSNNDVLLWGSFRLCVQVIQGSFRSTNIQVHMLGLQVLRSYAQKELTEGSETKLDSFMMLLTELLGDLFLVMETTLKECSNKKSVSVVDECLKLVFLFHTLAQSKKYRQDATTLLLEALLMVFSLSSDTVSQELAEVNTISRKLFSHFIQIPSVAIQIKDIMLSAPAERRLQLQDMVRASVSQGQITVPVATSAHSEQNIQDSCSKNPGSTSEASDCVATHGNNDNEVVDDDWDDDWDAFQSLPAIANDGVDSGEISLTTRYNEQIPQENSSYGSCNADITARAMEDITCVDKELEEPSDLQFSSTEQQPKHDLPGSSHEGCAKLERHPSVDCKEQLADDETADELQQQVHEDTDHVNKDSEVLSAEIHGVKLDILDEDVEDDSPMNSNNLSDIAEEES

SEQ ID NO: 21033 - protein, 328 aa, Zea mays
  VARIANT 93: note = Ancestral polymorphism is S, Derived polymorphism is R
MATRSSVLLLLTALAAATAAPSAATRKLMFLVQPQPNLLTYHNGAVLSGDIPVSILWYGRFTPAQKAVVSDFLLALSGAAPPQGSPSVAQWWSSVNQLYLSKAAAAAAVSKNGAHGGGGAKSARVVLSGQASDEGCSLGKSLKLSQLPALAAKARPAAARGGVALVLTARDVAVEGFCTSRCGHHGSYGGGGGGRAAYAWVGDAADQCPGQCAWPFHQPAYGPQAPPLVPPSGDAGTDGVVINVASMVAGAVTNPFGDGFYQGDRGSPLEAATACAGVYGSGAYPGYAGQLLVDRATGASYNAHGARGRKYLLPALFDPDTSACSTLV

SEQ ID NO: 21034 - protein, 388 aa, Zea mays
  VARIANT 251: note = Ancestral polymorphism is R, Derived polymorphism is C
MSNPGSLPASAHHEHEHTPLCRSCGAPTTSPTPAPWSGTTDSPPPAYRPIRLPAINAPTNTAAIVLSPVPQPLPVPPAAPPHAFLVPAKRITSPDDIARFHASVHGLHFLGFVAALSASVHGRKLSDPLPSPPSPAIAALLDLVSALAALVASTPPLPHSSRYGNPAFRLWHEKLTDSASELISRITATASSPADLAGADVELAPYLLDSFGNATRIDYGTGHETNFAAFLYCLARLGLITEPDYPAVVLRVFTAYLDLMRTLQDTYQLEPAGSHGVWGLDDYHFLPFIFGSAQLIDHKYMKPKSIHNPDILENFSKEYMYLACVAYVKKVKKGPFMEHSPMLDDISGVANWKKVNSGLLKMYKAEVLEKVPIMQHFLFGSLIKWYEL

SEQ ID NO: 21035 - protein, 65 aa, Zea mays
  VARIANT 12: note = Ancestral polymorphism is N, Derived polymorphism is S
  VARIANT 21: note = Ancestral polymorphism is P, Derived polymorphism is L
MEEEKAKVHKASPYPYTTDYPMMSLKTEPKHCTRPEGFQLESLVRHEFEQQKPTEERWRIEREEA

SEQ ID NO: 21036 - protein, 189 aa, Zea mays
  VARIANT 15..189: note = Derived polymorphism lacks residues 15 to 189
  VARIANT 40: note = Ancestral polymorphism is G, Derived polymorphism is C
  VARIANT 58: note = Ancestral polymorphism is Y, Derived polymorphism is C
  VARIANT 90: note = Ancestral polymorphism is Y, Derived polymorphism is D
  VARIANT 114: note = Ancestral polymorphism is P, Derived polymorphism is Q
  VARIANT 140: note = Ancestral polymorphism is G, Derived polymorphism is A
MGQSLMKLFFDDSCQKEVKVVMLGLDAAGKTTALYRLHVGEALSTVPTIGFNVEKVEYKNVAFTVWDVGGQDKLRPLWRQYLSNSDALIYVVDSVDRDRIGVAREEFQAIVKDPLMLSSVVLVLANKQDMKGAMSPSEVGQRLGLYDLKNRTSRAVGACALTGEGLHEGLGWLAATLKDARAWGTSVRF

SEQ ID NO: 21037 - protein, 273 aa, Zea mays
  VARIANT 116: note = Ancestral polymorphism is G, Derived polymorphism is S
MEDEEHEVYGQEIPVDGEDVDMSAGDDATKVPLDAHSHPTPLPRRPNPSGGTDPSHAQLQELDEMKRRLKEMEEEAAALREMQAKVAKDMQDNTWIITGHLVLVPPLSKESKTPTGTLVISKREEANPSISEMDGNGDPNATTSENKEEMDSRSVFVGNVDYACTPEEVQQHFNSCGTVNRVTILTDKFGQPKGFAYVEFVEVEAVQEAIKLNESELHGRQLKVAPKRTNVPGMKQPRGRGFNPYRPYGYSPYGYGYGYGRFPRFRRPRRPYF

SEQ ID NO: 21038 - protein, 96 aa, Zea mays
  VARIANT 48..96: note = Derived polymorphism lacks residues 48 to 96
  VARIANT 50: note = Ancestral polymorphism is R, Derived polymorphism is C
  VARIANT 73: note = Ancestral polymorphism is T, Derived polymorphism is I
MRAASKKRGIEVTSISRPIKPSDFHDFDLILAMDRQNYEDILNSFERWRRKEPLPDSAPNKVKLMCSYCKHHTESEVPDPYYGGPQGFEKVSSMMY

SEQ ID NO: 21039 - protein, 91 aa, Zea mays
  VARIANT 7: note = Ancestral polymorphism is S, Derived polymorphism is L
  VARIANT 8: note = Ancestral polymorphism is G, Derived polymorphism is W
  VARIANT 11: note = Ancestral polymorphism is A, Derived polymorphism is G
  VARIANT 22: note = Ancestral polymorphism is R, Derived polymorphism is L
  VARIANT 27: note = Ancestral polymorphism is V, Derived polymorphism is A
  VARIANT 29: note = Ancestral polymorphism is R, Derived polymorphism is Q
  VARIANT 30: note = Ancestral polymorphism is E, Derived polymorphism is D
  VARIANT 34: note = Ancestral polymorphism is P, Derived polymorphism is S
  VARIANT 64: note = Ancestral polymorphism is A, Derived polymorphism is V
  VARIANT 76: note = Ancestral polymorphism is T, Derived polymorphism is M
  VARIANT 80: note = Ancestral polymorphism is K, Derived polymorphism is E
MVLRDISGKEAMAQWGHVGVARVGEDAARDGDQPMLIFFPKGSSPNASGPGGRRFTEDGDEDMAAAVLGLWGLWKTNEREVSSLLASNMEV

SEQ ID NO: 21040 - protein, 522 aa, Zea mays
  VARIANT 363..522: note = Derived polymorphism lacks residues 363 to 522
  VARIANT 312: note = Ancestral polymorphism is S, Derived polymorphism is N
  VARIANT 218: note = Ancestral polymorphism is P, Derived polymorphism is S
  VARIANT 211: note = Ancestral polymorphism is R, Derived polymorphism is S
  VARIANT 204: note = Ancestral polymorphism is L, Derived polymorphism is I
  VARIANT 1: note = Ancestral polymorphism is M, Derived polymorphism is T
MKMMGDTASSHKLGDLVAEAWPAATAVTRLGKERRWRKTGAVLVAAGLVTLPFLVFFTSGQESLSRAWESAAAKLTMMAGAGSLEASDARTTTGGGATKVGADELLGGLLVRGGFDRGSCLSRFESAQYYKHSPYAPSPYLLRKLRAYEARHKRCGPGTPLYAKSVEQIRSGGGGGGGAECNYLVWLPYNGLGNRMLSLVSTFLYALLSDRVMLVHFPADFTDLFCEPFPDATWVLPPDFPVANLSDLGMNPEQSYRNLLASKKIANDPTVQSSVPPWVFLNLCHEQDIDKLFYCSDDQLALAKVSWLLLFSDMYFVPSLYSMGEFHGELHRLFPAMESVCHLLSRYLFHPTNSVWGLVARYYNSYLARADQRIGIQIRIFEYFARISADDMYSQILACSRQEHILPETEDDNLTTTEAAAAAGNTTSTAILIASLYPDYYEMLRSRYYEHPAKGGVRVSVFQPTHEKHTVPDPPCVRMVTMEPCSHRPASMECQAKAVAKEDLAQHVMACEDEGVGIKLFD

SEQ ID NO: 21041 - protein, 322 aa, Zea mays
  VARIANT 86: note = Ancestral polymorphism is N, Derived polymorphism is Y
  VARIANT 73: note = Ancestral polymorphism is R, Derived polymorphism is L
  VARIANT 57: note = Ancestral polymorphism is C, Derived polymorphism is Y
  VARIANT 56: note = Ancestral polymorphism is E, Derived polymorphism is K
  VARIANT 46..322: note = Derived polymorphism lacks residues 46 to 322
  VARIANT 11: note = Ancestral polymorphism is T, Derived polymorphism is I
MQWYLVAALLTILTSSQGILTTLSQSNGKYNYDYATIPFLAELFKLSVSGFFLWKECHSSSPPRMTKEWRSVRLYVVPSVIYLIHNNVQFATLTYVDPSTYQIMGNLKIVTTGILFRLVLKRKLSNIQWMAIVLLAVGTTTSQVKGCGDSPCDSLFSAPLEGYLLGILSACLSALAGVYTEYLMKKNNDSLYWQNVQLYTFGVIFNMGWLIYGDFKAGFELGPWWQRLFNGYSITTWMVVFNLGSTGLLVSWLMKYSDNIVKVYSTSMAMLLTMVLSIYLFSVKATIQLFLGIIICIISLQMYFMPVHMLIELPQTLPVTSK

SEQ ID NO: 21042 - protein, 143 aa, Zea mays
  VARIANT 121: note = Ancestral polymorphism is W, Derived polymorphism is S
  VARIANT 117: note = Ancestral polymorphism is V, Derived polymorphism is M
  VARIANT 116: note = Ancestral polymorphism is S, Derived polymorphism is Y
  VARIANT 100: note = Ancestral polymorphism is G, Derived polymorphism is R
  VARIANT 99: note = Ancestral polymorphism is G, Derived polymorphism is E
  VARIANT 75: note = Ancestral polymorphism is C, Derived polymorphism is F
  VARIANT 63: note = Ancestral polymorphism is M, Derived polymorphism is V
  VARIANT 39: note = Ancestral polymorphism is R, Derived polymorphism is S
MLCYATLPFQFCFRENELSNIEIIVADISKFEMERSFDRIVSIEMFEHMKNYKSLLKKISRWVKEDGLLFVHLFCHKAFPYHFEDKNDDDWITRYFFTGGTMPSANLLLYFQEDVSVVYHWLVSGMHYARTRYILPNFKLSSP

SEQ ID NO: 21043 - protein, 146 aa, Zea mays
  VARIANT 38: note = Ancestral polymorphism is P, Derived polymorphism is R
  VARIANT 50: note = Ancestral polymorphism is H, Derived polymorphism is R
  VARIANT 56: note = Ancestral polymorphism is L, Derived polymorphism is P
  VARIANT 128..146: note = Derived polymorphism lacks residues 128 to 146
MRIEAEGRWVGMRIPESKDSDVEDAVPINFEIDLYIIPRLFELNSKVVLHFFYSRLVPLVLLLVEGSTPIDIGEHGCEMLLVVKKATQESGSKFELLGFAAVHNFYHYPESIRLRISQDDQVAEIQAQGLSKDFVQWVNQGEAFWY

SEQ ID NO: 21044 - protein, 222 aa, Zea mays
  VARIANT 80: note = Ancestral polymorphism is C, Derived polymorphism is W
  VARIANT 82: note = Ancestral polymorphism is P, Derived polymorphism is L
  VARIANT 88: note = Ancestral polymorphism is N, Derived polymorphism is I
  VARIANT 96..222: note = Derived polymorphism lacks residues 96 to 222
  VARIANT 134..222: note = Derived polymorphism lacks residues 134 to 222
  VARIANT 154..222: note = Derived polymorphism lacks residues 154 to 222
  VARIANT 171..222: note = Derived polymorphism lacks residues 171 to 222
  VARIANT 191..222: note = Derived polymorphism lacks residues 191 to 222
MQGRRRSPSRDSTTTKQDDYVPDTLHTKQMIEQDGLNCSVHSDILVQKHLLLGHCKELRGSPLVRFIEAFGTAFSRTTFCVPISEVINDMLLSHFQQIRTFIQMRTNLKVVDNSGAKQIAPKGYRQSIPSLKFQKLAEVTCKMLTAPLYDFVFQQNQQIPIKGNLAKIRRETKCIPDLIFQIEDYEKYLIQLSKLTKVNLLRHVKRSVARDFQMQASVLSVL

SEQ ID NO: 21045 - protein, 190 aa, Zea mays
  VARIANT 22..190: note = Derived polymorphism lacks residues 22 to 190
MAQSVLVGAFLGSIVLGTTDLQSRLGFFAFNLTYLLTSTTEALPVFLHERRILERETSRGAYRVSSYVTSNAAVFLPFLLAAAVLYAAPVYWLVGLAREPAAFAYCALVVWRVRGPVVNEYSGARGARECLASAGGAGGLCVLDGAGLLRQQGMRERMRWSSLGVMLGFVVGYRVLCFVILSFRCHRTGR

SEQ ID NO: 21046 - protein, 511 aa, Zea mays
  VARIANT 133..511: note = Derived polymorphism lacks residues 133 to 511
  VARIANT 352: note = Ancestral polymorphism is G, Derived polymorphism is V
MGMGTEWPPTPAQQRKAVVSAGSALKLVLFVILAGLALRLLVGPPAYLLPPTAAPEGAARLFAVPERERTAGGGGGGIPSVDECSSTFHFCGISYLHVFDQENSRLQRGDGGVRLTTSISLVVRLSFSTSCMERWPETDDAVFTLTDSEPLTALGKKEGSTKPEESCDLFHGEWVPNSSGPAYTNASCRFIESPQNCMTNGRPDTDYLNWRWKPYGCEVSPFDGKKFLDGMKGKHWALIGDSILRNHVQSLLCLLSKVEDATEVYHDDTFRSRRWHFPSYNFTISLVWAPFLVKAKIFEDDDGVSTADLQLHLDVLETDWTSQWEKFDYAVISTGQWFFKTAVYWENGAAIGCHSCQNKTLEERPPEYSFRRALRVAFQFITSSPHKPVVFYRTWAPSHFENGEWFSGGTCNRTAPFKPGEAGDREWDNSMWRIEREEFHNAVPIGGDRLKLLDTFELSLLRPDGHPGPYRAYHPYEKGVTAKVQNDCLHWCLPGPIDAWNDVIMKMVAKD

SEQ ID NO: 21047 - protein, 146 aa, Zea mays
  VARIANT 31: note = Ancestral polymorphism is R, Derived polymorphism is H
  VARIANT 32: note = Ancestral polymorphism is R, Derived polymorphism is C
  VARIANT 128..146: note = Derived polymorphism lacks residues 128 to 146
MLNERTALTSCSRARLFHLLAFTPRRHRRRRRRRRKRRCSTSTCSAPTRAATWTLFASPSAVGLPPSSSSTRSSPSTRHGTKGSSSWIRSGRSSTLPARRSASSKPTASKKRKRRSSWIAQTKLRKGWQPKKLRCRRPRAPSTPRS

SEQ ID NO: 21048 - protein, 150 aa, Zea mays
  VARIANT 118: note = Ancestral polymorphism is L, Derived polymorphism is P
  VARIANT 4: note = Ancestral polymorphism is G, Derived polymorphism is V
MAAGAGRSNPARCMTHPKHRHAAGVCPFCLRDRLSRLSAGAAHESASASSSFSPSSPSEETAAHSSSAQAPRPRRGSLALLLLHQEGTGSEAAPALAAGRQAEQQERKARRGNFWARLQQQLYHGGWHRKDDGCSVAAERQNAAAAAAVV

SEQ ID NO: 21049 - protein, 55 aa, Zea mays
  VARIANT 8: note = Ancestral polymorphism is R, Derived polymorphism is G
  VARIANT 24: note = Ancestral polymorphism is E, Derived polymorphism is K
  VARIANT 25: note = Ancestral polymorphism is R, Derived polymorphism is W
  VARIANT 28: note = Ancestral polymorphism is A, Derived polymorphism is V
  VARIANT 35: note = Ancestral polymorphism is A, Derived polymorphism is T
MAEKKKRRALYSAAVKRKEAERTERKMAAVARERAWAARLIELKQLEEEIKAVMA

SEQ ID NO: 21050 - protein, 161 aa, Zea mays
  VARIANT 58: note = Ancestral polymorphism is A, Derived polymorphism is D
  VARIANT 48: note = Ancestral polymorphism is P, Derived polymorphism is L
  VARIANT 12: note = Ancestral polymorphism is V, Derived polymorphism is I
  VARIANT 7..161: note = Derived polymorphism lacks residues 7 to 161
  VARIANT 6: note = Ancestral polymorphism is R, Derived polymorphism is H
MAFVQRRKGLDVVGSFGLLQPLADGFKLILKEPISPSSANFSLFRMAPMATFMLSLVAWAIVPFDYGMILLDPNIGLLYLFAISSLGVYGIIIAGWSSKTGGGRSVAYDIRTNWSKWVCAAGVERSTLHRCGLTGLGLINPLFHSSRGRSLFWAGIEKWKS

SEQ ID NO: 21051 - protein, 155 aa, Zea mays
  VARIANT 142..155: note = Derived polymorphism lacks residues 142 to 155
  VARIANT 106: note = Ancestral polymorphism is K, Derived polymorphism is N
  VARIANT 97..155: note = Derived polymorphism lacks residues 97 to 155
  VARIANT 88: note = Ancestral polymorphism is S, Derived polymorphism is L
  VARIANT 47: note = Ancestral polymorphism is P, Derived polymorphism is L
  VARIANT 40: note = Ancestral polymorphism is R, Derived polymorphism is C
  VARIANT 39: note = Ancestral polymorphism is A, Derived polymorphism is T
  VARIANT 15..155: note = Derived polymorphism lacks residues 15 to 155
MQQENFSDAEVSVKQIPMMASSQGGAICKFAAYFGEVLARRMYRFRPPSDCSLLDAAFDFAFHAHFYESCPTLNSSTSPRTRPSSRLSVADAASIKQGMQCRLFSKPSLSALIEAAVGTNEEARESNPEANELELSRVSEMQLILADPSQCILLN

SEQ ID NO: 21052 - protein, 486 aa, Zea mays
  VARIANT 315: note = Ancestral polymorphism is G, Derived polymorphism is R
MSLFQMTGRHEGAKEGGSGRVAMWLLLPPLFVLIVLKTDFLPQVVVHTVSYAGFDNARWQQHPHDPEAVKEYNHQNQILATNGPHEDSSSINSDTGASVSKLTCDFGNPHSDTCTMEGDLRIHGKSATVYVVAASTHRPENSTITVRPYTRKWEQETMSRIREVTMRSMPPAFSFVIPPKCTVRHDVPAVVFSTGGCGTNFFHGMSDLVVPLYITSREYDGRVQLLIADYNAEWVAKFRPVLAALSTFPVIDLDADAAVRCFPSVHVGLESHKKMLAIDPSLSRNGYTMMGFRDFLRSVFSLQRPWATPVRLGSGQKPRLLMVLRRRSRELSNEAETIAAMEEIGFEVVAARPEDVSDMSRFAGVVNSCDVMVGVHGAGLTNMVFLPHNGTVVQIVPWGNMKWACWYAFGEPVPGMGLRYVEYEATAEETTLKEKYPRDHPVFTDPQSIHRQGKAWSTFLNGQNVTLDIDRFKAVMLQVFQSITTE

SEQ ID NO: 21053 - protein, 346 aa, Zea mays
  VARIANT 298: note = Ancestral polymorphism is T, Derived polymorphism is M
MAEALCDQLFSDIDGDLMRQHTSDTDDLLGILESWEDCVSGGVATTPCGAEVPQTTAADGAAKRRRQGCRDVDAVPAAPKRQKCSPVSSAASEDGAVNKTSHITVERNRRKQMNEHIAVLRSLMPCFYVKRGDQASIIGGVVDYIKELQQVLQSLEAKKQRKAYTEQVLSPRPPACCSPRPPLSPRPHMLPLKSTPPISPRPAVPISPRTPPAPSSPYKPCRLPPPGSSAYASPAMTTTREPTAATYLPSLDTIAADLCAYAANKNKQLQALAAAAGGDVVLPDVKVEFSGANLVVKTVSHRAPGQTVKVIAALEGRSLEILDAKINTINDTAVNSYTIKVLLSSS

SEQ ID NO: 21054 - protein, 490 aa, Zea mays
  VARIANT 6: note = Ancestral polymorphism is W, Derived polymorphism is C
  VARIANT 387: note = Ancestral polymorphism is Q, Derived polymorphism is L
  VARIANT 415: note = Ancestral polymorphism is P, Derived polymorphism is L
  VARIANT 422: note = Ancestral polymorphism is P, Derived polymorphism is L
MGRFRCLRHASRFLALQSGEVVLQRRAWIQPNTSCSSTGIYISNKFYDRFMLIPFVWSRSFHATDHRCSKHKDYYKILGVPKDASQDDIKKAFHSLAKKYHPDTNRGNTAAKRMFQEIRDAYEASKHYGTLQRGSNMTCYFLEGQGWSLMGPIMTHSRDPIIRDIILSQNSADRMMAISLVNSIKYFLRWFPVPANTFSSICHVCADPEYEVELNLSFSEAANGCIKQVSYHAKNVCDSCGGRGHLPNAKIYVCPSCKGLGRVTMYPFTSVCSSCRGIGKVIKDYCLTCQGSGVVGGMKHVTLDMPAGLDSGDTINVPEAGDSGGLGVQSGNLHIKIQVEIDPLFTRDGADIHVDKRISFTQAMLGGKVEVPTLNGKTEVKDCQIRQDIWGTNMSDSEFISPRKPTILFMEHLLLTYYSFSPYISNCWVVTERQRMLLEEFAVEEAAKEHNTFVAGNWWELVAENMTKQNVMVGIGILLLIHLMLSKAMN

SEQ ID NO: 21055 - protein, 474 aa, Zea mays
  VARIANT 303..474: note = Ancestral polymorphism lacks residues 303 to 474
  VARIANT 296: note = Ancestral polymorphism is G, Derived polymorphism is S
  VARIANT 259..474: note = Derived polymorphism lacks residues 259 to 474
  VARIANT 258..474: note = Derived polymorphism lacks residues 258 to 474
  VARIANT 233: note = Ancestral polymorphism is C, Derived polymorphism is R
  VARIANT 225: note = Ancestral polymorphism is R, Derived polymorphism is I
  VARIANT 215: note = Ancestral polymorphism is S, Derived polymorphism is P
  VARIANT 211: note = Ancestral polymorphism is R, Derived polymorphism is S
  VARIANT 208..474: note = Ancestral polymorphism lacks residues 208 to 474
MATIFMAAVVASDLGGISVRLGNHSRSMAVMAWEQVSDLEEVGHFQARPRLPPHGAPHLPAQAIQPHQARLLPALVVPLVRNLQDTPRARGASARPAQLDLIGFHTFDYARHFLSCCGRMLGLSYEFKRGHIRLEYYGRTVSIKILPVGVHMEQLKTVPEVMSGCQQYQFYCDLLAQPEADAIGVAFSDDWIFVGSVSKQLIVVFDFWFVRVGSSWGFLGRLFLRRLLCSVFCKKHFFLLVIILDGPHITGMDEQDSSQWSIVEPLTSYGQGLDLPGPRHRSLMSGYNLTDVVVTGNSAGVLQSKFDGSCQLFQGTMELLMAIACNVKVHNVTIETSLDAPLTDGIVLDHIYTGIEEYVYSRTKKSRKSPSRNDKHMNKIVLSEHDDHKYGDLEPKPFHHVGLVDLDCEMQVVGPDSRARCFRSWPLALSPLPEAMRSGHACFALASLLLLWLGIAAAQKASSWKTLNGEASMT

SEQ ID NO: 21056 - protein, 698 aa, Zea mays
  VARIANT 122: note = Ancestral polymorphism is C, Derived polymorphism is Y
  VARIANT 168: note = Ancestral polymorphism is D, Derived polymorphism is V
  VARIANT 451..698: note = Derived polymorphism lacks residues 451 to 698
  VARIANT 603..698: note = Derived polymorphism lacks residues 603 to 698
MESDGDNEIDHLTTFEIDNNVPATNSDKMTEGVDVGKQHQTTSTITTNEDDDEIVLFKEDDDEEEGYLFAGQDGESGEDIEIDETQDAFTVNPDVPDLYDKVYSNITEETHLLSIVADCDYCKAKKFQYEPPGFCCRNGLINLATFETPLQLRRLWESADADVRHFRDNIRFFNGHFSFTSLYCCLDSMTTNMDCGIYTFHAHGMMYHNARSFDREAGAEHKLLELYFYDDDPSLEHRYPKCRQQQLEKDKGVIKQLVEILKGNPYSEHLRSMGHVDNVEDYHIALILDQTLNQKLYNAPITSEVAAIWIDGSERREELKKRLTKQNILGKVQAYIYVVEFQKRGLPHAHFLLIMQRKYKRTCPEQYDLLISAEIPDKKKYPQLYKMVIKHMMHCGVLNPKCPCTKGADRSMLTAYFEANRLHEETWGILYRDFSEWYTLQQGNVWQRRKRNMGGQSMGKDIKTFPLPAIIDRYDNSHGTDREIYEEESIEPTIEDIAMIETLNEEQSFTKQSGTTKFLQKPSLIIWDEASMTKRQAIEALDNSMRDIMGQPGLPFGGKTVVFGGDFRQVLPIVCKGSRAQIVAASLQSSYLWESMCHLKLVQNMRAQSDPLFAEYLLHIGDGIDESNNDGDVRLPDEVCVPYTGNDRDLDSLIDDIYPNLNETMSNTSYITSRAILSTQNDWVDMINMRMIDRFQGE

SEQ ID NO: 21057 - protein, 588 aa, Zea mays
  VARIANT 289..588: note = Derived polymorphism lacks residues 289 to 588
  VARIANT 520: note = Ancestral polymorphism is A, Derived polymorphism is V
MREMISRSTQGNGETHGEEVSGIKDVVTQKDTTKPTNIDLMPRRGVTEDDTRRGLAKRHLRPPTPGTGAQAHRRHELYAKESSKMMLEVLRKGPRTTAELEAPVADTSLVSADAPRVLADTVLDISGGERAFIEADEAKELLSPLTKPGNSYKRICFSNRSFGIGAANVAGPILDSVKNQLTEVDISDFVAGRSEDEALDVMRIFSKALEGSVLRYLNISDNALGEKGVRAFSELLKSQESLEELYVMNDGISEEAAKALSELIPATEKLKVLHFHNNMTGDEVELNKQFSCTLPLTNKTNKQVTFKFKYHGGTNFGRISGGPYITTSYDYDAPSDEYGNIRQPKYGHLKDLHDLIRSMEKILVHGKYNDTSYGKNAIVTKYTYGGSSVCFINNQFVDRDVKVTLGGGTHLVPAWSVSILPDCKTVAYNTAKIKTQTSVMVKKANSVEKELEALRWSWMPENLKPFMTDHRDSFRQSQLLEQIATSTDQSDYLWYRTSLEHKGEGSYTLYVNTSGHEMYVFVNGRLVGQNYSADGAFVFQLQSPVKLHSGKNYVSLLSGTVGLKSAKTLVIVAENPDKFRVVAFSARF

SEQ ID NO: 21058 - protein, 29 aa, Zea mays
  VARIANT 18..29: note = Derived polymorphism lacks residues 18 to 29
  VARIANT 24: note = Ancestral polymorphism is A, Derived polymorphism is V
MKGFAITGPIDKECADLWPRIASAANTIV

SEQ ID NO: 21059 - protein, 148 aa, Zea mays
  VARIANT 122: note = Ancestral polymorphism is G, Derived polymorphism is C
  VARIANT 98: note = Ancestral polymorphism is P, Derived polymorphism is L
  VARIANT 63: note = Ancestral polymorphism is S, Derived polymorphism is F
  VARIANT 49: note = Ancestral polymorphism is P, Derived polymorphism is S
  VARIANT 35..148: note = Derived polymorphism lacks residues 35 to 148
  VARIANT 32..148: note = Derived polymorphism lacks residues 32 to 148
  VARIANT 4..148: note = Derived polymorphism lacks residues 4 to 148
MASYQRMNMFCGSSSEPIFPVPKSLLNANMKEKYQTSTLLSYNDPSSMPIRQPYQVPSAKSSSAYVICFFEYDTKSSSTYVIYFFEYADNPLSRSSFPELSLSLTTGLANESVSTGKAACAGSLTNADGRKAASFIEPTRPTYVDNVS

SEQ ID NO: 21060 - protein, 361 aa, Zea mays
  VARIANT 181: note = Ancestral polymorphism is C, Derived polymorphism is S
  VARIANT 237: note = Ancestral polymorphism is P, Derived polymorphism is L
  VARIANT 309: note = Ancestral polymorphism is N, Derived polymorphism is K
  VARIANT 342..361: note = Derived polymorphism lacks residues 342 to 361
MEVGDARNGSAAAALTKGGADDAARKPLPPCCVKAKARVPETEANCHDTVVSGWFTEPRSRFGKTSKVQYFNNPMWPGEAHSLKVEKILFQGKSPYQEILVFESSTYGNVLVLDGIVQLTDKDECAYQEMVTHLPLCSIPAPKNVLVVGGGDGGVLREIARHDSVETIDICEIDQLVIDVSKEFFPNLSIGFKDPRVRLHVGDAVDFLRNSPEGKYDAIIVDSSDPIGPAQALVEKPFIQTIARALKPGGVLCNLAESMWLHTHLIQDMLAICRQTFKGAVHYAWTSVPTYPSGVIGFLLCAKEGRAVNFLTPANPIEKIEGAAKAGRELRFYNSEEKPKESVSEPQKIKILSNNAILTAS

SEQ ID NO: 21061 - protein, 79 aa, Zea mays
  VARIANT 36: note = Ancestral polymorphism is V, Derived polymorphism is F
  VARIANT 1: note = Ancestral polymorphism is M, Derived polymorphism is I
MKFDEEPNYAKLISLFDGLIEAPASRQIGTDGALKVGQKRGRLLADLEEDEQPKKKVRLGNPVAQWISVYNARRPMKQR

SEQ ID NO: 21062 - protein, 200 aa, Zea mays
  VARIANT 131: note = Ancestral polymorphism is M, Derived polymorphism is T
  VARIANT 126: note = Ancestral polymorphism is G, Derived polymorphism is D
  VARIANT 120..200: note = Derived polymorphism lacks residues 120 to 200
  VARIANT 115: note = Ancestral polymorphism is A, Derived polymorphism is V
  VARIANT 111: note = Ancestral polymorphism is T, Derived polymorphism is I
  VARIANT 98: note = Ancestral polymorphism is D, Derived polymorphism is H
  VARIANT 91: note = Ancestral polymorphism is A, Derived polymorphism is T
  VARIANT 90: note = Ancestral polymorphism is W, Derived polymorphism is L
  VARIANT 86: note = Ancestral polymorphism is L, Derived polymorphism is Q
  VARIANT 42: note = Ancestral polymorphism is L, Derived polymorphism is F
  VARIANT 27: note = Ancestral polymorphism is A, Derived polymorphism is V
  VARIANT 24: note = Ancestral polymorphism is G, Derived polymorphism is S
  VARIANT 21..200: note = Derived polymorphism lacks residues 21 to 200
  VARIANT 20: note = Ancestral polymorphism is V, Derived polymorphism is F
  VARIANT 3..200: note = Derived polymorphism lacks residues 3 to 200
MVQAWESSAPDENKTPEKRFWQSGQSAIAQTISLLLQKAWLFQADNMEGSALPPLSCVNDASVLLEFVMSSVTCMEETESLKVFELVATWADAIANWDSWEEMEDQGVFNTIKEAVNFHQRFDLDGLFLKTHFLKVCKNGTIKIGLETNKIMDFIKFDVGNVVMMTGGRNTWLVGVIKNREKHKGSFETIHVLLRAFCYV

SEQ ID NO: 21063 - protein, 141 aa, Zea mays
  VARIANT 67: note = Ancestral polymorphism is A, Derived polymorphism is T
MGNCLNTASKRSHRGMLLPEEEESLSEIRRISQLLREEEEDGYEVVGMHSVSEQLVQEVVAVAPGVTAPAEGLKVKIVLTRGELEWLMAQLKSGEQRLEDVLQHMQAAKGAGGGGGSFAGDNKAGWRPRLESILESSETQS

SEQ ID NO: 21064 - protein, 166 aa, Zea mays
  VARIANT 67: note = Ancestral polymorphism is S, Derived polymorphism is C
  VARIANT 139: note = Ancestral polymorphism is C, Derived polymorphism is R
MALDSSILNPTRRCAPLLFFGLSSPLATHTSGEGAEEVSKFCRSNPDEEMPRIPLIKFPKRNLKAPSAPVPSQPADQHATLMSRLGAKAEAPSSGGIKNYRFSSDVPSPPSHTAVGGQASLLPKRKPLTEEEIEAIMVCLLFTEAEYECNAMFVLSIWFIELIHFV

SEQ ID NO: 21065 - protein, 363 aa, Zea mays
  VARIANT 22: note = Ancestral polymorphism is R, Derived polymorphism is H
  VARIANT 30: note = Ancestral polymorphism is S, Derived polymorphism is P
  VARIANT 39: note = Ancestral polymorphism is V, Derived polymorphism is I
  VARIANT 44: note = Ancestral polymorphism is S, Derived polymorphism is F
  VARIANT 48: note = Ancestral polymorphism is E, Derived polymorphism is K
  VARIANT 54: note = Ancestral polymorphism is R, Derived polymorphism is W
  VARIANT 72: note = Ancestral polymorphism is G, Derived polymorphism is R
  VARIANT 77: note = Ancestral polymorphism is S, Derived polymorphism is F
  VARIANT 86: note = Ancestral polymorphism is Y, Derived polymorphism is C
  VARIANT 98: note = Ancestral polymorphism is R, Derived polymorphism is C
  VARIANT 110: note = Ancestral polymorphism is R, Derived polymorphism is C
  VARIANT 127..363: note = Derived polymorphism lacks residues 127 to 363
  VARIANT 200: note = Ancestral polymorphism is T, Derived polymorphism is I
  VARIANT 226..363: note = Derived polymorphism lacks residues 226 to 363
  VARIANT 259..363: note = Derived polymorphism lacks residues 259 to 363
MASDEGPSTELIGCSRRLSRTRDYVVALKSLMLVHRLLVDGDPFFHRELLHGTRRGTRLLNLSDFRDEAHSGSWDHSAFVRTYALYLDQRLEFFLQERKQGFLDRFLACRPTGGAKQSRMVLVALYQIVRESFQLYSDICEVLAVLLDRFFDMEYAECVKAFEAYASAAKQIDELSAFYAWCKDTGVARSSEYLEVQRVTDKLLETLEKFMMDRAKRPKSPPREPEPEPVKEEPEPDMNSIKALPAPEDYKEPEPVKVEEEVKPEPPPQPQGDLVDLREHTVSADEQGNRLALALFQGPPAAGGNNGSWEAFPSNGGNEVTSAWQNPAAEPGKADWELAPRRDSKQLVHAEASNVKWYGPAAA

SEQ ID NO: 21066 - protein, 97 aa, Zea mays
  VARIANT 3: note = Ancestral polymorphism is S, Derived polymorphism is L
  VARIANT 6: note = Ancestral polymorphism is S, Derived polymorphism is L
  VARIANT 63: note = Ancestral polymorphism is T, Derived polymorphism is I
  VARIANT 71: note = Ancestral polymorphism is P, Derived polymorphism is S
  VARIANT 77: note = Ancestral polymorphism is D, Derived polymorphism is Y
  VARIANT 89: note = Ancestral polymorphism is E, Derived polymorphism is K
  VARIANT 91..97: note = Derived polymorphism lacks residues 91 to 97
MPSSRSRSTTSTPSPPRAHHRLRIRRPPPTPARPRACAYSTAFLGFVVARHKEWNTLWAEVPTALKLCVDPNKFIMDVVTDVFPVDRREFRSSADLA

SEQ ID NO: 21067 - protein, 94 aa, Zea mays
  VARIANT 37: note = Ancestral polymorphism is A, Derived polymorphism is T
  VARIANT 47: note = Ancestral polymorphism is G, Derived polymorphism is S
  VARIANT 48: note = Ancestral polymorphism is V, Derived polymorphism is M
  VARIANT 54..94: note = Derived polymorphism lacks residues 54 to 94
  VARIANT 76: note = Ancestral polymorphism is N, Derived polymorphism is D
MPWFTEAAAVGVKGFPTVLLFVNGTEHAYHGLHTKDTIVTWVRKKTGVPIIRLQSKDSAEEFLKKDMTFVIGLFKNFEGADHEEFVKATTTDNE

SEQ ID NO: 21068 - protein, 222 aa, Zea mays
  VARIANT 8: note = Ancestral polymorphism is R, Derived polymorphism is S
MAMAGRQRAPEAASSYLPPVTAAALLLWVFISCAHVEASVDFANLTALQKHAEFFDRNKDGIITASELFEGYVAIGCDAEYARVTAASISAGVGPITSPADAPLPHTSIYVEYIHRAMHGSDTGAYDAEGRFVPAKFEEIFTKHAKVRPDALTFEEIEEMILANRDPLDPESWAAPEGEWGLTYKLASDKQGFLHKDSARGIYDGSVFYKLEEQRTSAASEM

SEQ ID NO: 21069 - protein, 357 aa, Zea mays
  VARIANT 298..357: note = Derived polymorphism lacks residues 298 to 357
  VARIANT 80: note = Ancestral polymorphism is P, Derived polymorphism is S
  VARIANT 28: note = Ancestral polymorphism is L, Derived polymorphism is M
MHPGVGPLSVPPGFRFHPTDEELLYYYLRKKVAYEPIDLDVIREIDLNKLEPWDLKERCKIGTGPQNEWYFFSHKDKKYPTGTRTNRATTAGFWKATGRDKAIFLGSARRIGLRKTLVFYIGRAPHGKKTEWIMHEYRLDEENVEIQEDGWVVCRVFKKKNYEQRGHNMAEMAALDDDELQPFTVPVVPAGTSSLPTTDHKNNPHLMQYDFPSFDPSMQLPQLMSADQPVPTLFPSHPGVATAMSSSIDVECSQNLLTMLTSNGSDGMLHVRAGGAGAGVDRFAGTTDWSILDKLLASHQNLDQLFHGKVTAASASPMAPYHQQLMELGGSSSSSSLQRLPLQYLSGETTDLLRFPK

SEQ ID NO: 21070 - protein, 647 aa, Zea mays
  VARIANT 629: note = Ancestral polymorphism is G, Derived polymorphism is R
  VARIANT 557..647: note = Derived polymorphism lacks residues 557 to 647
  VARIANT 528..647: note = Derived polymorphism lacks residues 528 to 647
  VARIANT 460..647: note = Derived polymorphism lacks residues 460 to 647
  VARIANT 454..647: note = Derived polymorphism lacks residues 454 to 647
  VARIANT 408..647: note = Derived polymorphism lacks residues 408 to 647
  VARIANT 331..647: note = Derived polymorphism lacks residues 331 to 647
  VARIANT 213..647: note = Derived polymorphism lacks residues 213 to 647
  VARIANT 101..647: note = Derived polymorphism lacks residues 101 to 647
MVKRPKPHSVVEANLFRLPSFNADGRGVGMQEEAPREVSIGEERPRCVVSTNLSGDLLLENRAHVGEDGRSSCVTATPPSRWIPAGSGSGSSSSYGGSVSWLESRSGFAVAKSNGKPDKEKKGGRGGTPPTPKDSKPRKPAVPKASAAGHGTSRNADKSPGSGSANHKAPTPKVAASRLATTPELCSKALREAMCFMMDPALGRKTCYVQFPQRFDGIDLHDRYANRNIVFFDINMKDLDGIQGPVYVGTGCCFNRQALYGYDPILTEADLEPNIVIKRCCGRRKKKNKSYMDSQSRIMKRTESSAPIFNMEDIEEGIEGYEDERSVLMSQRKLEKHFGQSPIFIASTFMTQGGIPPSTNPDSLLKEAIHVISCGYEDKTEWGKEIGWIYGSVTEDILTGFKMHARGWQSIYCMQPRPCFKGSAPINLSDRLNQVLRWALGSVEILLSRHCPIWYGYNGRLKLLERLAYINTIVYPITSIPLIAYCVLPAICLLTNKFIIPEISNYAGVFFILLFASIFATVILELRWSGVGIEDWWRNEQFWVIGGTSAHLFAVFQGLLKVLAGIDTNFTVTSKASDEDGDFAELYVFKRTSLLIPPTIALVINLVGMVAGISYAINSGYQSWGPLFGKLFLLVYLLSLSFFNNFQ

SEQ ID NO: 21071 - protein, 100 aa, Zea mays
  VARIANT 94: note = Ancestral polymorphism is R, Derived polymorphism is H
MQGPGAAASARSLGPGPPLSPPSPLVIPPPPTPHAPRHPLSCPTPTTTEDFTVAACIQALLSAPNPDDPLSDNTAKHWKSNEVKTVETAKEWTRLYASGA

SEQ ID NO: 21072 - protein, 272 aa, Zea mays
  VARIANT 233: note = Ancestral polymorphism is R, Derived polymorphism is S
  VARIANT 229: note = Ancestral polymorphism is R, Derived polymorphism is H
  VARIANT 187: note = Ancestral polymorphism is A, Derived polymorphism is D
MVPPPSRSHARPKHHPAPAAIPAHHLRCEESCSAMERDCLRCALIPSRHHRPRLGSRSFAHNVHGRRSRIPVLGQALNGRRSRNPPLLRPGTLYDRRLSPACPPARQSPSSPCPAPLAMTPSPAIPRSSRPMACRSTPTSSSICLYWSVYYAEGIGTGSGSQEWKANLSWVLAALAPRRSSSSASHDIAALVVYFAFGSVAEELRVGWPVAMQMSSEASKVAVPESVLRKRKREEQWATEKKEKALVEKKKSIESRKLIFTRAKQYAEEYDA

SEQ ID NO: 21073 - protein, 298 aa, Zea mays
  VARIANT 97: note = Ancestral polymorphism is P, Derived polymorphism is L
  VARIANT 72..298: note = Derived polymorphism lacks residues 72 to 298
  VARIANT 20..298: note = Derived polymorphism lacks residues 20 to 298
MKGKENGEHYELSPQVLNEWAPKSAARNGSGDHNNGSPVVTGHQDNMILEGNPKITPVVPKSIHDGKKPPRENCKTIPVVPEKEINEKKASTYRTIPVIKESDEKKIGMREKRESKEANSAEMVEENRKKKHNDSSVVKHSKLPPVCLRVDPLPRKKPGNDSSRSPSPPRKNTDNTKKDVEEAQSQILEPKQSSTSKDITVSEEEEAPTSKDGQKVQAASTTVGDQENADLKSIEEDHVQENAGAGSLNGCDKRKNEDGTVIESETAKDDARTYGVNLSESDVAVRIQSAYRGYDVRK

SEQ ID NO: 21074 - protein, 139 aa, Zea mays
  VARIANT 72: note = Ancestral polymorphism is G, Derived polymorphism is C
MAMEVQGTRRPQDAGVKVKFIETQFISSDAASFKAVVQRLTGKSPAASSQTTQPPAHPQPQSLRPCRPTFIGAGQQQTTGWTDLQAAGGYLATMPAPKQEHLAAAPRLEDMNELCDFADLFYTTAASNRPDGGASVFPY

SEQ ID NO: 21075 - protein, 407 aa, Zea mays
  VARIANT 109: note = Ancestral polymorphism is S, Derived polymorphism is R
MASALSSLGPTALLICALLCTFLSSEVGFVRQATALGINYGQVANNLPPPAQVVQLLSSLRIGKVRIYDVNPQVLTAFAGTGIELVVTVPDDLVPGMASSASQALQWVSASLRPYFPATRVTGIAVGNEVFTGDDEQLKASLVPAMRNLHAALAQLGMDAYVRVSTANSLAVLATSYPPSQGVFTQAAAPYMAQLLRFLAETSSPFWVNAYPYFAYKDDPTKVSLDYALSNPSHVGAVDPFTKLQYTSMLYAQVDAVTFAAARLGYGGVPVHVSETGWPSKGDANEAGATVENARQYNRNLLMRQVSGEGTPLRPRLRLEVYLFALFNEDMKPGPASERNYGLYQPDMSMVYNVGLSQLATTSAASLSLATSPAARTTDVGKDYAGLCLVAVSVAILLITQQGSLLL

SEQ ID NO: 21076 - protein, 437 aa, Zea mays
  VARIANT 301: note = Ancestral polymorphism is K, Derived polymorphism is M
MATRSLTSALPLSRTPRVPSHRPSLRRLQTLTRALTSSSPQAMASSPTPKKVLVPIANGTEPMEAVITIDVLRRAGADVAVASVEPGATSVAASWGIKLTADALLADLADDEFDLISLPGGMPGSSTFGECKVLEKMVKKHVEKGKLYAAICAAPAMTLGTWGLLNGLKATCYPSFIDKLPSEVHAVESRVQIDGKCMTSRGPGTAMEYSVILVEQLYGKEKAKEVAGPMVMRPQHGVEFSMKEVNSTSWNVGETPNILVPIANGTEEMEATMILDILRRAKANVVVASLEDKLEIVASRKVKMIADVLLDDALKEQYDLILLPGGLGGAEAYAKSDKLMDLIKKQAAANRLYGAICASPAIALEPHGLLKGKKVTSYPAMWNKLADQSECNNRVIVDGNLITSQGPGTSMEFSLAIVEKLFGRERALELAKSMVFI

SEQ ID NO: 21077 - protein, 81 aa, Zea mays
  VARIANT 67: note = Ancestral polymorphism is G, Derived polymorphism is R
MKLVLCFCICVVLVIASSPVPLSDSRPAMGRRWLRDEVVIAKGPEGNTTSASASAWSEEAPGIPYDGSKRLSPGGPNPQHH

SEQ ID NO: 21078 - protein, 284 aa, Zea mays
  VARIANT 92: note = Ancestral polymorphism is G, Derived polymorphism is C
  VARIANT 176: note = Ancestral polymorphism is A, Derived polymorphism is E
  VARIANT 186: note = Ancestral polymorphism is G, Derived polymorphism is C
MSAAACGHPFYGTCWRGYISTAISDGPGCLMLRCPDPSCAAAVGQDMINSLANVEDTEKYGRYLRRSYIEDNRKTKWCPAPGCEYAAEFVMGSGSYDVNCNCSYGFCWNCTEEAHRPVDCATVSKWILKNSAESENMNWYRRIKHKFLNSANCLEFLLWISLMNWYMIMDMEGGTAVGLMLAGMGCSIDVFRMNMHQGYPKETLVRFLKAREWNVAKAHKMIVECLNWRIQNEIDSVLERPIAPVDLYRLICDSQLIGLSGYTKEGLPIFGIGVGHSTYMTKLR

SEQ ID NO: 21079 - protein, 219 aa, Zea mays
  VARIANT 163..219: note = Derived polymorphism lacks residues 163 to 219
  VARIANT 175..219: note = Derived polymorphism lacks residues 175 to 219
MPSVHRSRMLASDRAAPDNDNIRLCSMLLASVVSLLLLCGALSVVSSTSALAVTMVYVIVGPAAIMLMLVFLGCLVASGTRALAVELEPQPQAPAEAAPARLARRLCACGLSDVADVATMPAFPFQPAQPVAASEGERQPPRRSGVLCAVCLEDVRAGEIVRQLPACRHLFHVECIDVWLRSHRTCPLCRCELPRRKATAQQTVAVTLATPEAAPLPPV

SEQ ID NO: 21080 - protein, 154 aa, Zea mays
  VARIANT 24: note = Ancestral polymorphism is L, Derived polymorphism is P
  VARIANT 90: note = Ancestral polymorphism is D, Derived polymorphism is V
MEARRSSAALVSVAAAAAAVALLLVLAAEPSRAERFVVGDAARWTWGYNYTDWVIRKGPFFQNDTLVFMYDPPNATVHAHSVYLMRTAADYQSCNLKAAKLVASVTQGAGSGFEFVLRKRKQHYFVCGERGGIHCTMGQMKFVVKPKSSACRDD

SEQ ID NO: 21081 - protein, 217 aa, Zea mays
  VARIANT 93: note = Ancestral polymorphism is E, Derived polymorphism is K
  VARIANT 82: note = Ancestral polymorphism is G, Derived polymorphism is S
MAAKPAETTGGTGSNKAESSFSSSMAVAADVYKGELTPLQRHVAFFDRNKDGVIYPAETYQGFRAIGAGVTLSAFSSVFINGLLGPKTIPENEKAPAFKLPIYVKNIQKGKHGSDSGVYDANGRFVAEKFEEIFKKHAHTRPDALTGKELKELLKANREPNDFKGWLGGFTEWKMLYSLCKDEKGFLHKDTVRAVYDGSLFEMLERERNAKESTKTK

SEQ ID NO: 21082 - protein, 71 aa, Zea mays
  VARIANT 9: note = Ancestral polymorphism is R, Derived polymorphism is W
MARERREIRRIESAAARQVTFSKRRRGLFKKAEELAVLCDADVALVVFSATGRLSQFASSRHALSIDHSAS

SEQ ID NO: 21083 - protein, 248 aa, Zea mays
  VARIANT 50: note = Ancestral polymorphism is W, Derived polymorphism is G
MDLPWLDLPFTFLTLLLATRLAYDYYGDVAAAFAGGFSIQVFLFYCFARWYRYAIAGRAAAAAGARDDPSPSARPPPQQEEDADAPPVLTPLLGSPDGARPSTLANRCFAVVFMVFVPLVIVVFERSQADVVAYALCLANIIVMVVWLSPDTGSTVSAAKSLLRLSDDEDEGSGGSSGAEDKCCVCLAGMREDQALRALPRCGHSFHDKCIGKWLKAHPTCPVCRATAVPPPLHSGGGDPLDDDISPV

SEQ ID NO: 21084 - protein, 254 aa, Zea mays
  VARIANT 159: note = Ancestral polymorphism is R, Derived polymorphism is S
MASKNQVDLESQKPMPTHAVVASAPAASVPASSGTGSVVAGISDAAPETQPLLAEPNGHSQEEGLGDGGGTDDETTQLERAMAQAFRSTAELAKHLPTGAVLAFEVLSPVFTNGGKCDDVNRVMTSWLVGLCAAACFFLCFTDSFHDAKGTVRYAVATRRGLWVIDGTPAPPPVEAAEKRIKFIDFFHAFLSVIVFMSVAMFDGNVGACFNPVMSYDTRQVLTAVPLAGGLVGTLLFATFPSTRHGIGFPIHAS

SEQ ID NO: 21085 - protein, 301 aa, Zea mays
  VARIANT 176..301: note = Ancestral polymorphism lacks residues 176 to 301
MSATPLPPPGPDGAVALLPPPGTDMTGICFRDQLWLDTYPLDRNLVFDYFALSPFYDITCNNESLRSRQIHPLDMSHLTKMTGMEYLLSEVMEPHLFVIRKQKRESPEKSSPMLAYYILDGSIYQAPQLCNVFASRISRAMHHISKAFTIACSKLEKIGNGYLQNYNYLPPQHTTGKLQQGLCEIAIVITTTKHLDLNKNLKGHTGSATIEHLETEPDAVASESKTQKEAIDLKELKRIDHILSSLKRKIGAAPPPPPYPEGYVPPSAEQEKAPDDVAASEAPPQLDPIIDQGPSKRPRFQ

SEQ ID NO: 21086 - protein, 117 aa, Zea mays
  VARIANT 23: note = Ancestral polymorphism is V, Derived polymorphism is L
MKTTSSGIAVVLLVAMLAVQSAVADISCSDVLNDLSPCLPFLQGKAAKPSESNNQCCDGVRTLYAAADTRPDRQATCRCLKAAYVQVHAVLSAAQELPGDCGLSLSYNITPDIDCDK

SEQ ID NO: 21087 - protein, 119 aa, Zea mays
  VARIANT 21: note = Ancestral polymorphism is T, Derived polymorphism is K
MAASSPARLYYLLLLVLFLATPSVRASSELRRRVEAPAALPPGVAEGRARQEFHVPPTKGPIREQRRSRPRGGGTGAWTFSAMLPRGFVPPSGSSDCHNDMPANAADPQFFACSGAGTP

SEQ ID NO: 21088 - protein, 319 aa, Zea mays
  VARIANT 205..319: note = Derived polymorphism lacks residues 205 to 319
  VARIANT 110..319: note = Derived polymorphism lacks residues 110 to 319
  VARIANT 75..319: note = Derived polymorphism lacks residues 75 to 319
  VARIANT 28..319: note = Derived polymorphism lacks residues 28 to 319
MLSVFFFILLHCMIVPVVNCMKTQTGGWMSLGGILLCVTGSEAMYADLGHFSQSTIQIAFIYVVYPALVLAYMGQASFISQHHNFESSYHIGFYVSVPVHGQIYIPEINWMLMILCLAVTIGFRDTKHLANAQGLAVITVMLVTTCLMSLVIVLCWNKSALGFLLFFGAIEVIYFSASLVKFHEGAWVPITLSFIFMVVMCVWHYGTIKKYEFDVQNKVSVNWLLNLGPSLGIVRVRGIRLIHTELMSGIPAIFYHFVTNLPAFHQVLVFLCVKSVPVPHVQPEERFLVGRIGPKEYRLYRVIVRYGYRDVQKDDLQLS

SEQ ID NO: 21089 - protein, 399 aa, Zea mays
  VARIANT 179: note = Ancestral polymorphism is R, Derived polymorphism is W
MVAVAVDGLIRGADAVPAAEREAVRAAAAEAAAKGGEGESGKEEVREYESDMRKLEELLSKLNPSAEEFVPQSRRRVDGGAPRLSADAPVFVSPAIDYYARHHQLPPPPLLQQQQPMHVLQFVGGVGGVGMGGGGGMDSSSDGSANGQPNRRRRNGFIQGRRRMMGARPRRADREDSVRRTVYVSDVDQHVTEQKLAEVFSTCGQVVDCRICGDPNSVLRFAFIEFADDVAAQAALALGGTVLGFYPVKVLPSKTAILPVNPKFLPHTDDEKEMVSRTVYCTNIDKKIAEDEVKQFFEGTCGEVSRLRLLGDYVHSTCIAFVEFVQADSAILALNCSGIVLGTLPVRQEHIFCMCSEVLIMGEPIKDTSPLAIAPCDVILNSAHLKPSSRAANFWATKP

SEQ ID NO: 21090 - protein, 150 aa, Zea mays
  VARIANT 142: note = Ancestral polymorphism is R, Derived polymorphism is I
  VARIANT 124: note = Ancestral polymorphism is D, Derived polymorphism is Y
  VARIANT 99..150: note = Derived polymorphism lacks residues 99 to 150
MKDRSREYFDKLFNGENESSNLVLDDSFDDTNRYFEENSEHRDHGGSEEDGGKAMGPDGNPMERPYDKRVPQKLKGKFYRTTIRLAILYGAKCWPTKRQQRQQLSVKIGKGQPKMTWDETIKRDLKEWNISKELAKDRCAWRLAINMSEP

SEQ ID NO: 21091 - protein, 181 aa, Zea mays
  VARIANT 82: note = Ancestral polymorphism is P, Derived polymorphism is R
MTIVEMHVSIDCDGCEDNVRKALEKLKGVHHVSIDRMHGKVTVTGSVSQRKALRAARRTGKLAVLWPSAYNNPSYHQAHAMRAYYQYQYQANKPAQAQQHQYYSSVQRAGKNSGGISAVATKPAGHQYPQSKASSYNYHVHGYYDSELYGYYHDHEQPGDVVPAAVRSYFSDENPSACSIM

SEQ ID NO: 21092 - protein, 970 aa, Zea mays
  VARIANT 50..970: note = Derived polymorphism lacks residues 50 to 970
  VARIANT 32: note = Ancestral polymorphism is D, Derived polymorphism is G
MASTKAPGPGEKHHSIDAQLRQLVPGKVSEDDKLIEYDALLVDRFLNILQDLHGPSLREFVQECYEVSADYEGKGDTTKLGELGAKLTGLAPADAILVASSILHMLNLANLAEEVQIAHRRRNSKLKKGGFADEGSATTESDIEETLKRLVSEVGKSPEEVFEALKNQTVDLVFTAHPTQSARRSLLQKNARIRNCLTQLNAKDITDDDKQELDEALQREIQAAFRTDEIRRAQPTPQDEMRYGMSYIHETVWKGVPKFLRRVDTALKNIGINERLPYNVSLIRFSSWMGGDRDGNPRVTPEVTRDVCLLARMMAANLYIDQIEELMFELSMWRCNDELRVRAEELHSSSGSKVTKYYIEFWKQIPPNEPYRVILGHVRDKLYNTRERARHLLASGVSEISAESSFTSIEEFLEPLELCYKSLCDCGDKAIADGSLLDLLRQVFTFGLSLVKLDIRQESERHTDVIDAITTHLGIGSYREWPEDKRQEWLLSELRGKRPLLPPDLPQTDEIADVIGAFHVLAELPPDSFGPYIISMATAPSDVLAVELLQRECGVRQPLPVVPLFERLADLQSAPASVERLFSVDWYMDRIKGKQQVMVGYSDSGKDAGRLSAAWQLYRAQEEMAQVAKRYGVKLTLFHGRGGTVGRGGGPTHLAILSQPPDTINGSIRVTVQGEVIEFCFGEEHLCFQTLQRFTAATLEHGMHPPVSPKPEWRKLMDEMAVVATEEYRSVVVKEARFVEYFRSATPETEYGRMNIGSRPAKRRPGGGITTLRAIPWIFSWTQTRFHLPVWLGVGAAFKFAIDKDVRNFQVLKEMYNEWPFFRVTLDLLEMVFAKGDPGIAGLYDELLVAEELKPFGKQLRDKYVETQQLLLQIAGHKDILEGDPFLKQGLVLRNPYITTLNVFQAYTLKRIRDPNFKVTPQPPLSKEFADENKPAGLVKLNPASEYPPGLEDTLILTMKGIAAGMQNTG

SEQ ID NO: 21093 - protein, 201 aa, Zea mays
  VARIANT 125..201: note = Derived polymorphism lacks residues 125 to 201
  VARIANT 112: note = Ancestral polymorphism is S, Derived polymorphism is L
  VARIANT 104: note = Ancestral polymorphism is T, Derived polymorphism is M
  VARIANT 86..201: note = Derived polymorphism lacks residues 86 to 201
  VARIANT 46: note = Ancestral polymorphism is R, Derived polymorphism is Q
MLQQQQQASKSLASAWRGGVLEQRSVRDLMSGGADEETRRSWSCARLWLLVVCALTSLSVGVVVSKSTGFSNHPHRGFETGAFTHQDFAGHKGTIRTGDVQWMTAGRGIVHSEMPAGDDVHKGLQLWINLSSKYKMIEPQYQELERKDISRGESENGGVEALGVATPVYTHPHHVCGLHHAPRVSPAPARPGGLECLRLRR

SEQ ID NO: 21094 - protein, 84 aa, Zea mays
  VARIANT 36..84: note = Derived polymorphism lacks residues 36 to 84
MGHRDVQLVLSFWATLFATEVQSESKWKQLGELAMSNGKVRKLEAYIISYWYKKGHRPIEHPLLPDARRIVKFDLYDDSVSTRI

SEQ ID NO: 21095 - protein, 653 aa, Zea mays
  VARIANT 508: note = Ancestral polymorphism is L, Derived polymorphism is P
  VARIANT 78: note = Ancestral polymorphism is P, Derived polymorphism is L
  VARIANT 28: note = Ancestral polymorphism is V, Derived polymorphism is F
MHPRIASGATGKSTAPYGSWESPISAAVVSAAGRTAEGFAIAGDGRLVWVETRPEDGGRAVLVKEAAGPGGKALDVTPQGFAVRSLAQEYGGGAFAVQGDTVVFSNYTDQRLYRQTIGDNSPLPLTPDYGPVVRYADGVFDPHFHRFVTIMEDHRHNSSNPITTIVAVGISDPDVKEYTMLVSGNDFYAFPRIDPTKKRMAWIEWSNPNMSWDKSQLWVGYFNEKGEIKEKICVAGGDPTIVESPTEPKWSSKGELFFITDRRSGFWNIYKWDEHSRAVTPLHSLDAEFSKPMWIFGVSSYGFLGIDDTSHKIVCSYRMESHVGVLDQDSESFLKIDIPFSSVTNIVVSGDRSFYIEGASATLPVSIAKVTLDEKRTMATDFSIVWSSSEDVAQYESYFSLPEFVEFPNVINGQHAYAYFYAPYNNFFQGSSDEKPPLLVRTHGKRIYYFCPFFFIFFIPHHCLGGPTDEARGVLDLSVQYWTSRGWAFVDVNYGGSSGYGREFRERLLAQWGVVDVNDCCSCAAFLIADLASLRAGMHKFEAYYIDNLVGNKQAYFERSPINFVENFSCPVILFQGLEDTVVSPDQATKIYKAIKDKGLPVALVEYEGEQHGFRKAENIKFTLEQEMVFLARLVGEFKVPDDITPIKIENFD

SEQ ID NO: 21096 - protein, 167 aa, Zea mays
  VARIANT 109: note = Ancestral polymorphism is K, Derived polymorphism is E
MSLPPDGVDGGAGTGDDWFLDCGILDDLPAVACGAFSWDASSSSSNPSLPHMGRAQCLTCYLVELSVEVGSYVNTNDVFKEPGSNKRSGSNDVHVPTSKASREKMRRNKLNDRFLELGSTLEPGKPVKVDKAAILSDATRMVIQLHSEAQQLKETNGSLEEKIKELK

SEQ ID NO: 21097 - protein, 441 aa, Zea mays
  VARIANT 408: note = Ancestral polymorphism is R, Derived polymorphism is C
  VARIANT 394: note = Ancestral polymorphism is M, Derived polymorphism is K
  VARIANT 257..441: note = Derived polymorphism lacks residues 257 to 441
MDRYVLGRLLGKGNFAKVYHARSIVSGEEVAIKIMDKDHLSKLDVTHHMIIREIDIMRRVRHPHVVHILEVMATKTRIFVVMEFVGGGPLNDCLIHRRIDEASARRVFQQIVCALDYCHSLGVYHRDIKPDNILLDAVGNIKVADFGLSALTDTAQREAQLHTVCGTPMFIAPEVFQRCGYDGAKADVWACGVLLFRLMAGHFPFNHKDTNMYHMIHRCNYRCPRWFSVGLARLVRRMICFEPARRITIPEIKENIWFKDFNEIQWDPPSPTSCSMRSSLSAPSLTTLENTGSVTVKAQSRMRHHKSLNAFDIIASSPSLDLSGLFEEHCEQMQFVFPVPVSKIISRLEEIAGHVSFTARTKEYQMRIEEKRNGNQIVLLISFKIFEFTQERVMLKMCKKGGDTTQYRQFMNDVLKPGLHGLVDGLSEENAECVDCNSGRS

SEQ ID NO: 21098 - protein, 102 aa, Zea mays
  VARIANT 24: note = Ancestral polymorphism is P, Derived polymorphism is S
  VARIANT 9: note = Ancestral polymorphism is S, Derived polymorphism is Y
MNPLIAVASVIAAGLAVGLASIGPGVGQGTAAGQALEGIARQPEAEGLAVLEPSMIGEPADPFATPLEILPEWYFFPVFQILRTVPNKLLGVLLMVLCQRAY

SEQ ID NO: 21099 - protein, 667 aa, Zea mays
  VARIANT 401: note = Ancestral polymorphism is V, Derived polymorphism is D
MPLQVHPLLLLLLVSSLPSCAISSGSSSCAGRDDAAIVAAAFRHVRNFRAPRTKACQPVRALRLPSRNLTGAVSWAALANLSALAAVDLSGNALQGAIPGGFWRAPSLRAVDVSRNQLGGALRVEPNPQLQSLNVSGNRFTGVDGVEGLSGLVALDVSTNRIRAVPRGLRRLTRLKRLDLSSNGMRGWFPGDLPPLGGVRSLNVSYNKFSGVVDTGAVTKFGHSAFVHAGNASLVFSGHSTEPRRPRPSPPHGKSKKNGGSAGTSTESKATRSSKKRKHLSIVAVAVICGVVSLAMLLCLVGCVACGVLKSRQKGGKDDDEKKPQWGEKGEEEKEEDVVVAAARGASAAPVVLFERPLMQLTLANLAAATSGFGRESQLAERGGRSGAAYRAVLPGDQHVVVRVVEGAMAGLGEDDNPAAAATAFRELARLRHPNILPLLGYCIAGKLSKEKLLLYEYMEKGDLHRWLHELPAGRPDMDDTGSGDIWEAAEVKRSISDWPTRHRIALGVARGLAFLHQGWAGGSGRAAVVHGHLVPTNVLLCDDLEPRISDFGHNNDPPSAATPEGDVYGFGVLVLELMTGQAGWDEASVSWARGIIRDGKGLDIVDPRVRDEAAGAEAEAEREMVECLRVGYLCTAHAPDKRPTMQQVVGVLKDIRPAPPTPGPGS

SEQ ID NO: 21100 - protein, 186 aa, Zea mays
  VARIANT 44: note = Ancestral polymorphism is G, Derived polymorphism is S
  VARIANT 51: note = Ancestral polymorphism is G, Derived polymorphism is S
  VARIANT 73: note = Ancestral polymorphism is T, Derived polymorphism is I
MEVVEGAVAVAVAGGSTLTVVLPTILAAVEGTYRGGSGVGNDFGDQRQHYGGDNRGGGRGDFQGLPFEPKHCTRHLKFLVGVRFEQEQMKEHALHLLVLSHVFSVPSLKTVCVDQLQRGFLAPDNVVDMLQLARLCDAPCLALTCVRMVIGDFKTISLTDGWKVMRRANPNFDLPKTLSHRETQAA

SEQ ID NO: 21101 - protein, 184 aa, Zea mays
  VARIANT 56..184: note = Derived polymorphism lacks residues 56 to 184
  VARIANT 55: note = Ancestral polymorphism is L, Derived polymorphism is R
MPPPPRLGAVTAALAVGNGSDTGQTDSWFELKVCVTALLTTGQSLLSVVYLCGNLGPECIIYAMLLFHRLLMFDPVNQDQAYFPYLTLFSINWKGNPTKSFELIIQRELSRRMFSCRGVDASTGHVGLYMATLGNCFEIDEWDPIEFSIRAKHFGHISDTPLPRAARWNRLNARCIVGSMHQHN

SEQ ID NO: 21102 - protein, 361 aa, Zea mays
  VARIANT 284: note = Ancestral polymorphism is R, Derived polymorphism is T
  VARIANT 254: note = Ancestral polymorphism is P, Derived polymorphism is T
  VARIANT 229..361: note = Derived polymorphism lacks residues 229 to 361
  VARIANT 199..361: note = Derived polymorphism lacks residues 199 to 361
  VARIANT 177: note = Ancestral polymorphism is G, Derived polymorphism is D
  VARIANT 173: note = Ancestral polymorphism is G, Derived polymorphism is S
  VARIANT 71: note = Ancestral polymorphism is A, Derived polymorphism is V
  VARIANT 1: note = Ancestral polymorphism is M, Derived polymorphism is V
MEDASFFASIVGTGAPSAASAASYVWRVSTTGCAGGESCLVSPAARRHNRQRWPLAPLHQPTCHAPVAYVAALIDAGKGKIWRKPKGRRVNQEIMCLDGKIIGDVRRSTLIWLGMREPSPIHSASSSLDGSGFKYPFHSHIVEIHGVVAWTRRGMVLTFQSLTYEDGVLDQRGRVHGTASGAALELEKGCVVTAEGTTQVSGGGVPLHNPPTPPLPSNHVGAEVYYLPYVTDAEYYTTGGKKISATSIYFESLPMSVTKGYINLIFVPSSSSAAAVCLILVLKRRVEWMQSKLEGCAPSRITAAKAIVKDGIVVMGHVGLTPQAITVLGGFRPQGKTVDSVVKVVETTLAMKETGCFSVVY

SEQ ID NO: 21103 - protein, 48 aa, Zea mays
  VARIANT 7: note = Ancestral polymorphism is T, Derived polymorphism is M
  VARIANT 29: note = Ancestral polymorphism is T, Derived polymorphism is I
MFPLQLTCLHAAFNNLGSMDVFMQIQPNTELCLLLMFILLHSEHLIPF

SEQ ID NO: 21104 - protein, 409 aa, Zea mays
  VARIANT 5: note = Ancestral polymorphism is R, Derived polymorphism is Q
  VARIANT 10: note = Ancestral polymorphism is Y, Derived polymorphism is N
  VARIANT 11: note = Ancestral polymorphism is S, Derived polymorphism is L
MAHLRLLFSYLRRNPQRHRLLSLFHFSSDAKSSSASPPPPPIKPVSYAPKPQQQAPPEESAAPTTPDVAPRDQSPLPRRPQQPMPPREWTRQDMRYVKDAAPAISPVSYPSRVAPLPEDRPVGGEVEEVQDGGLQGESERIQMNAARPTRSVFGMHEEDRLPYPTVIPVVKRPQKVAIDLIDAIRLVKTSANEKKRNFVETVEAHVILGVDPRRGDQMVRGALTLPHGTGKTVRVAVFAEGPGADEARAAGADVVGGDELIEEIRTGGGKLSFDKCIATPMFMPRLSKVARILGPRGLMPNPKLGSVTNDVSGAVKAAKSGRVDFKIDKTAIVHVGLGKVNFTEESLRENIGAFVHALLLAKPVGLKKTSKYVGYVKKFTLSSTMGPGLPVTIPSLSVAADHYNKVQVS

SEQ ID NO: 21105 - protein, 313 aa, Zea mays
  VARIANT 41: note = Ancestral polymorphism is R, Derived polymorphism is W
MASPTLMQCLVAVSLLSCVAHAQLSPTFYASSCPNLQSIVRAAMTQAVASEQRMGASLLRLFFHDCFVQGCDGSILLDAGGEKTAGPNLNSVRGFEVIDTIKRNVEAACPGVVSCADILALAARDGTNLLGGPTWSVPLGRRDSTTASASLANSNLPPPTASLGTLISLFGRQGLSPRDMTALSGAHTIGQARCTTFRGRIYGDTDINASFAALRQQTCPRSGGDGNLAPIDVQTPVRFDTAYFTNLLSRRGLFHSDQELFNGGSQDALVRQYSASASLFNADFVAAMIRMGNVGVLTGTAGQIRRNCRVVNS

SEQ ID NO: 21106 - protein, 88 aa, Zea mays
  VARIANT 44: note = Ancestral polymorphism is A, Derived polymorphism is V
  VARIANT 46: note = Ancestral polymorphism is T, Derived polymorphism is I
  VARIANT 47: note = Ancestral polymorphism is V, Derived polymorphism is M
  VARIANT 48: note = Ancestral polymorphism is H, Derived polymorphism is P
  VARIANT 67: note = Ancestral polymorphism is Q, Derived polymorphism is R
  VARIANT 69: note = Ancestral polymorphism is D, Derived polymorphism is N
  VARIANT 77: note = Ancestral polymorphism is T, Derived polymorphism is M
MADLYLSRKLAGASSLVSGSVGPNSFPASPTIGSKISRASRASATTVPGNENDVEELEMLLEAYFMQIDGTLNKLTTVCSMLLACCLC

SEQ ID NO: 21107 - protein, 138 aa, Zea mays
  VARIANT 33..138: note = Derived polymorphism lacks residues 33 to 138
  VARIANT 68: note = Ancestral polymorphism is A, Derived polymorphism is D
  VARIANT 80: note = Ancestral polymorphism is P, Derived polymorphism is S
  VARIANT 84: note = Ancestral polymorphism is I, Derived polymorphism is T
  VARIANT 91: note = Ancestral polymorphism is P, Derived polymorphism is T
  VARIANT 93: note = Ancestral polymorphism is R, Derived polymorphism is M
  VARIANT 100: note = Ancestral polymorphism is P, Derived polymorphism is S
MATPSSSLCSSFASLRTASIGHPRDITSSTPRWCFLLLQMALPEIAQKITWLENEDTLLDSSGETDLAEHHKLGLDISEPEKKIIYEMMRPERTLLYLVPGRLVVGFTKLHMFFPLTVFHVAGKKVSKVHKIQWLVNP

SEQ ID NO: 21108 - protein, 126 aa, Zea mays
  VARIANT 116..126: note = Derived polymorphism lacks residues 116 to 126
  VARIANT 108..126: note = Derived polymorphism lacks residues 108 to 126
  VARIANT 106..126: note = Derived polymorphism lacks residues 106 to 126
  VARIANT 36: note = Ancestral polymorphism is L, Derived polymorphism is P
  VARIANT 35: note = Ancestral polymorphism is R, Derived polymorphism is H
  VARIANT 30: note = Ancestral polymorphism is H, Derived polymorphism is Y
  VARIANT 29: note = Ancestral polymorphism is L, Derived polymorphism is P
  VARIANT 13: note = Ancestral polymorphism is D, Derived polymorphism is V
MFSHSVPINFEIDLYIIPRLFELNSKVLLHFFYSRLVPLVLLLVEGSTPIDIGEHGCEMLLVVKKATQESGSKFELLGFAAVHNFYHYPESIRLRISQDDQAAEIQAQGLSKDFVQWVNQGEAFWY

SEQ ID NO: 21109 - protein, 61 aa, Zea mays
  VARIANT 31..61: note = Derived polymorphism lacks residues 31 to 61
  VARIANT 6: note = Ancestral polymorphism is A, Derived polymorphism is T
MEVPPAYYAHLAAFRVCHYMDDDLSDQGSSSVASSRMKDGAVPVKQLPKVMESDKQFMFYC

SEQ ID NO: 21110 - protein, 48 aa, Zea mays
  VARIANT 10: note = Ancestral polymorphism is R, Derived polymorphism is M
MILPELGKERGYIIDTLFTFVFLTFVLFLRIITFYATQLPGPNYHCRE

SEQ ID NO: 21111 - protein, 274 aa, Zea mays
  VARIANT 99..274: note = Derived polymorphism lacks residues 99 to 274
  VARIANT 96: note = Ancestral polymorphism is G, Derived polymorphism is D
  VARIANT 74..274: note = Derived polymorphism lacks residues 74 to 274
  VARIANT 60: note = Ancestral polymorphism is G, Derived polymorphism is R
  VARIANT 53..274: note = Derived polymorphism lacks residues 53 to 274
  VARIANT 45: note = Ancestral polymorphism is G, Derived polymorphism is S
  VARIANT 43: note = Ancestral polymorphism is G, Derived polymorphism is S
  VARIANT 34..274: note = Derived polymorphism lacks residues 34 to 274
  VARIANT 24..274: note = Derived polymorphism lacks residues 24 to 274
MQVDTNGRGALDYGEFLAVSLHLQRMANDEHLRWAFLFFDKDGNGFIEPEELREALVDNGAADSMEEVVDDILQEVDTDKDGKISYEEFVAMMKTGTDWRKASRHYSRGRFNSLSMKRWRSPASDASQAQQLQKILSCGALIDGMGSDFSYNDTRHCSATDYSKPILDWLENSSDEVAETMAKNGRLLLKCPVVQSNVQAMKEKRRVKLDEQTDYQNSTGMMDKAVNLAMKRIIDKRRIHYHREHDGNSKHDWWRQPWDESEVEGLHITMDDFE

SEQ ID NO: 21112 - protein, 81 aa, Zea mays
  VARIANT 59: note = Ancestral polymorphism is T, Derived polymorphism is I
  VARIANT 54..81: note = Derived polymorphism lacks residues 54 to 81
  VARIANT 53: note = Ancestral polymorphism is R, Derived polymorphism is W
  VARIANT 50: note = Ancestral polymorphism is D, Derived polymorphism is V
  VARIANT 48: note = Ancestral polymorphism is E, Derived polymorphism is K
  VARIANT 44: note = Ancestral polymorphism is E, Derived polymorphism is K
  VARIANT 36: note = Ancestral polymorphism is I, Derived polymorphism is S
  VARIANT 22..81: note = Derived polymorphism lacks residues 22 to 81
  VARIANT 15: note = Ancestral polymorphism is P, Derived polymorphism is L
  VARIANT 8: note = Ancestral polymorphism is R, Derived polymorphism is C
  VARIANT 5: note = Ancestral polymorphism is N, Derived polymorphism is K
  VARIANT 3: note = Ancestral polymorphism is D, Derived polymorphism is Y
MLDINLFRTDKGGNPDLIHESQCSRFASVELVDEVIALDKAWRERQFELDKIRQELNATSKKIDKLKASKQEEEAKKLMEI

SEQ ID NO: 21113 - protein, 352 aa, Zea mays
  VARIANT 246..352: note = Derived polymorphism lacks residues 246 to 352
  VARIANT 146..352: note = Derived polymorphism lacks residues 146 to 352
MVSDPAPPSAPRYSAYSLPSTHLPGEDILFCIDVDLESVGADGAPTVGSIEPWLKCKDQPPQQGKEIPQTKADRAKLDGMYKCILCACCSTSCPSYWWNPEEYLGPATLFHANRSMYNFPILPIKFTKTGGACPAVPDYDLGWVKYTDCGVSPQDLHHVFTKFAHPQSGGNRGFNGSGLGLAICKSCSTQQVYEEGAKEVALSVVSGINLTLIAGEIKIKGIELQESCSLSFFSMVVGIFIGFIHLFSVDVYKKIVSKNKMSLFHEGVIETETMGTRVKESKTVLVEKELELIDEPQIQESPPVRALLHDEVDFAESSLAIRESDIPVKKVLIIVTITFVWPQQPYYLKPMF

SEQ ID NO: 21114 - protein, 463 aa, Zea mays
  VARIANT 281..463: note = Derived polymorphism lacks residues 281 to 463
  VARIANT 173..463: note = Derived polymorphism lacks residues 173 to 463
  VARIANT 166: note = Ancestral polymorphism is S, Derived polymorphism is Y
MAELKLPGPDAAPLCCRSSVLLAPPPSERLQQGAFLPYALELLGPTSARSMSMATQQLHSSMAMAPPPSSSLPRRGNAGTRALSLVWVEQRLPLLSPPRRPLEMAPNSPGTFLCFVSLPPLRTCQVFDKMSRETCCCSTVGAHRLVAVFAQPQHHRRSPPGRILISVISKTSGNNALLYRRENPLSLRCSFRSLKARNNHSSAVAPKDYCETYIQFLRDKRIVPDSDPPSPKDVDLLYQFIDKSKRLMVVTGAGMSTESGIPDYRSPNGAYSTGFKPLSHQGTLTSFTNFTNLYPKDNKVFILFICIHCSKADQLQEEAKGGSLLQNQLHNIPISTWSPHTGRSSSRQLRTLLLSYPLNTCLDILLQDWSKSKVVRSRSKVSETKAVFTSLVKQHYSLFDPTWEALFPEALAGKSVRRKLTRAGPRALIFPAPENAASASMRLLKITWAELALFATSGFTSLT

SEQ ID NO: 21115 - protein, 505 aa, Zea mays
  VARIANT 144..505: note = Derived polymorphism lacks residues 144 to 505
MEMAGAAGTEAWLPYVTTVASCAVGVFFLLYFYAPHWRIRDVPGPPALPVVGHLPLLARHGPDVFGLLAKKYGPIFRFHLGRQPLVIVADPELCREVGVRQFKLIPNRSLPAPIAGSPLHQKGLFFTRDERWSAMRNTIISLYQPSHLAGLVPTMQHCIERAADAIPAMVVQENGLVDFSDLSLKLATDIIGEAAFGVDFGLTASGPGCEAAEFIREHVHSTTSLKMDLSAPLSVVLGLVAPALQGPVRHLLSRVPGTADWRVARTNARLRARVDEIVVSRARGRGQHGERRKDFLSAVLDARDRSAALRELLTPDHVSALTYEHLLAGSATTAFTLSSAVYLVAGHPEVEAKLLAEVDAFGPRGAVPTADDLQHRFPYLDQASDTTMQRHGTWLWMAPGVLSRDAANFEDPGAFRPERFDPASEEQRRRHPCAHIPFGIGPRACVGQRFALQEVKLSMLHLYRRFLFRRSPRMESPPELQFGIVLNFKKGVKLVAVERCAAMPL

SEQ ID NO: 21116 - protein, 578 aa, Zea mays
  VARIANT 84..578: note = Derived polymorphism lacks residues 84 to 578
  VARIANT 189: note = Ancestral polymorphism is F, Derived polymorphism is I
MELLRPRGDGCCPRVLSVSLLLLAALLWKHVSAAAITRGDFPEGFVFGAGASAYQDIRLTVILEMWLRTSITITRHGQHFLLSSIIYTDCLRIRSQSCASWTDDFQEDVKLMHDMGLDAYRFSIAWSRLIPGIQPHVTIYHFDLPQALQDEYNGLLSPRIIWPWHEWIPLTAVRTVRSDDFTAYADVCFRSFGDRVKHWITVNEPNIEPIGGYDQGYLPPRRCSYPFGLGVTCTHGNSTTEPYAVAHHLLLAHASAVSLYRRKYQGEQGGRIGLTLLAWWYEPATQKPEDVEAAARANDFSLGWFMHPLVYGDYPPVMKRNVGARLPSLTARDSAMVRGSLDFVGINQYGAILVEADLGQLDRDLRDYYGDMATNFVTVPFESTVTRNQQVPRLGLRNHEAPWALSKLLEHLQTHYGNPPVMIHENGEAGQARALSLSRFSCRAHARFLSSPELMVPPPPPPPGAGHEPDPSGGFLYDDEFRAHFLRVYVEAALASVRNGSDLRGYFVWSFMDVFEFLFSYRFRFGLYGVDFAADNRTRYARRSARWYAGFLRGGGGDLTPAAAASVSTRTHGSTYSE

SEQ ID NO: 21117 - protein, 545 aa, Zea mays
  VARIANT 47: note = Ancestral polymorphism is N, Derived polymorphism is Y
  VARIANT 98: note = Ancestral polymorphism is G, Derived polymorphism is D
  VARIANT 353: note = Ancestral polymorphism is L, Derived polymorphism is S
MSCRAAPWSRPSHIAGPRVPTPARPRFALGSRNLWKNSWTIGAGVSNMFALPSTLFRCMASSGSGDGDFARSTLTDEAAPFPLYSWPDKQRPRVCILGGGFGGLYTALRLESLVWPNDKRPQVLLVDQSDKFVFKPMLYELLSGEVDIWEIAPSFTELLKNTSVQFVRDSVKLLRPSDHLRRKPGEPCTGGVVHLESGTVIEYDWLVLALGAEAKIDVVPGSAEYALPFTTLEDALRVESKLKMLERKRFGKSSPTIEVAIVGLGYSGVELAATISERLKNTGTVKAINVQTTVCPTAPQGNRDAALKVLESRNIQLFLGYFVSCIKEAPTSDESSSTVTYSEVDGDHRKLILDLQPAERGLKGQTLDADLVLWTVGSTSQIPRLQPPDAPYVIPLNGRGQVETEETLQVKGHPRTFAIGDSAALRDPSGKLLPATAQVAFQQADFAGWNLWAAINDRPLLPFRFQNLGEMMTLGRNDAAVTASFIEGLTLEGPLGHAARKLVYCLRMPTDEHRVKVGISWFTKAAIDSLASVQNAVSNTLTGSS

SEQ ID NO: 21118 - protein, 320 aa, Zea mays
  VARIANT 174..320: note = Derived polymorphism lacks residues 174 to 320
  VARIANT 66..320: note = Derived polymorphism lacks residues 66 to 320
MAVIITPATDYKLPAFVLADLESKNTGGMESALQKAEDIAVSMLAKGFVLGMDAVEKAKAFDEKHQLTSTATAKVASLDRTMGLSQKFSTGTLVVNEKMKEMDEKYQVAEKTKSALGAAKQTVSTASSFIMSNRYILTGAAWVTDAYNKVATTTTDASKSIKERMMAEQEGANQSGETAKVDLLEISEADEQEWKRHEDDSTKNVVQESPEMTCQESNSKTGIEEQKNHEGEIAVVSHMQENIDTAEKDPSCHESEVSKANVHDSVLMTEQSEREHNQPEGEFANTHVPGSPVTILVTVSTIDGNSSNGPKKPDSAEGFL

SEQ ID NO: 21119 - protein, 441 aa, Zea mays
  VARIANT 166: note = Ancestral polymorphism is A, Derived polymorphism is T
MRRWESKQAAAGASWRQEEGVVVGETGGGRIGRGSESRGHACLTARPVRSAAAAADMGDSGGSVVSVDVERISFGGKEHHIQTNHGSVSVAIYGEHDKPALITYPDIALNHMSCFQGLLFCPEAASLLLHNFCIYHISPPGHELGAAPILPSTPVASPDDLADQIADILDFFGLDSVMCLGVTAGAYILTLFATKYRERVLGLILVSPLCKAPSWSEWFYNKVMSNLLYYYGMCNVVKDILLQRYFGKGVRGGSAEPESDIVQACRSFLDQRQCVNVWRFIQTINEYVLFISKAYMFNSYGLTVPESVDEWNQIIIFCDALYRRKDLTENLKQLQCRTLIFVGENSQFHAEAVHMTAKLDRRYSALVEVQACGSVVTEEQPHAMLIPMEYFLMGYGLYRPSQINCSPRSPLNPFCISPELLSPESMGVKLKPIKTRANLKA

SEQ ID NO: 21120 - protein, 1395 aa, Zea mays
  VARIANT 589..1395: note = Derived polymorphism lacks residues 589 to 1395
MASSCLTACSSRTAKSLVALDLQPRQRQVALMVVGLVRVQDKGLLRSMEGLMHQYMAHNSYSSDLFFMSIPASHMFPLFQSLLMVGGLGGKGPASSSLPSFPTRPTSLPESSNFSSAPVGSGLARPNDDYMAVRGYAQKLDQYSTDYPLERRMYGEHSANLGRRDGLSDLDRRYTDQTATGHQVHDHMEQSSSMRHQQLLKGQLQPGSDTRQADYFAGRSAPAHQASQEIGVYGRVEADNRNISILGNAPYGRQQSASLLEGAPRTNIDSLYGQGSSGTGFGAGLPPGRDYASVKGLPHPSSDPDHRDSILPRVHPAVSMVDDRRVDRIGYRRELDLRDEERRRDLILEREKELERERERERERELRDFRDRERERERERERDHERLLRERERERERERERERERERERLRERREKERERDRKHRTDPRREHTPPRGPGDRRRSSSVRSEKPVRRISPRRDAVHRWTSMHRSPVKEIKREYICKVFPFRFVDDERDYLCLTKRYPRLAVTPEFSKIVLNWAKENLNLPLDTPVSLEHDIHDSDDNADEGAIISTEKTPSFNTPATIWNAKVLLMSGMSKGAFADITSLRSTEERVVHLNNILKFALFKKDRSLFAIGGPWNAAIDGGDPSVDCSCLIQTAIRCVKEMVQVDLSSCTHWNRFVEVHYNRIGKDGLFSHKEITVLFVPNLSECLPSVDIWKNNWILYKKSKAEREELTVKKEKSPGDSKEQMQVSGELNKGKSLDADQLKEGGVGCSDMKNEKCDADMKQQGNDGDSKVKVEEPVQKMGEDVEVKTTGDSSIDHAAGDKKPTKKKIIKKVVKVVRKKTTGPSIDKSCSEDKNVVAESANKTAEGGQSQQKNEDAGKQQVGAGISQQPEAKKTGKKKIIRRIVKRKVSGPGSQLTASTTPAETSKQEAEVQPDKNVESSIDVGNPQTKLQEGSKIPSEDISNQKEKPEEKEHPLTDLSSNEDKGNHEEAMEQKDMKNDVKKDKAMDDKEKNRDLKMDPKQKPLNDTKEKKRSDEPPKYPGFILQTKRNKESKLRSTSLSLDGLLDYTAKDIEESVFELSLFAESFSEMLQHRMGCVILSFLEKLYRRYVVKRNQRKRQREEDLKKEEKKSSEKRSKTMHETIIESVDNLGGSVEVTKEDEEKMSKDQSANVHAELPKEGQIKLGTDHPIVNHGEPAKEGDENMNTDHSEAVLDKPAADANMAEEDPEYEEDPEEIEIYEDDEDMDDAHAGAQNGEQVFFPAFDLNENTNDRDVKPEVATADGGNNRSSTQPEVGNITNTHERAASMEDKLSVAEKGDSVEGGEKVVSKEVKPAKDEVVDKDLLQAFRYFDINRAGYLKMDDLKCILHNLGKFLSSRDVKDLVQVALVESNSARDTRIIYPKLVKIVDL

SEQ ID NO: 21121 - protein, 206 aa, Zea mays
  VARIANT 160: note = Ancestral polymorphism is P, Derived polymorphism is L
  VARIANT 8: note = Ancestral polymorphism is E, Derived polymorphism is G
  VARIANT 1: note = Ancestral polymorphism is M, Derived polymorphism is I
MGQYDLGELKKEWEQRSKWFHIPISDASIPVTRGQRGVFEHEAETDNPQSELKPGIDLLGSVDEIFYDIYDRYEPVNEPSLDNCFVSTSYDATTHFETTVTDVLNMYTIITGKCFLAFVYGGDPLTDLSLHALLDKFMENKPRGSRIAEGRWHGGSQIAPAKKLNLNHHIIGGELLELSENEVPPEDIVFHRFYLNNTGPVKHKAK

SEQ ID NO: 21122 - protein, 329 aa, Zea mays
  VARIANT 17..329: note = Derived polymorphism lacks residues 17 to 329
  VARIANT 8: note = Ancestral polymorphism is G, Derived polymorphism is S
MVRALRLGGRAAAAARWCTCRRAAVALCVANLVAALLVARALYAPGSFAFAPKRGELKYSREQMRWVEESIRIRRAAEPVELIEAKVKKLRKAFTREEKTRKGLPLELKQKVSLEILQRLHDLGEGSNTTEQQEAVEAWRVGKLKDMRSASSKNLSNFGLSSEDSRMLKRALEFNWQRILEDIGLWIPPTIYHIEHDDKPENEPEDEEIIPGPPLPPECNTELHTDYGGTAVRWGLTHHKESAADCCQACIDQAKRARPGALKCNIWVYCPSEYGCYSPDKYEHKHQECWLKQADHPRLNFKDRYPEPYRDSHPTAPVVVPWMSGVITA

SEQ ID NO: 21123 - protein, 112 aa, Zea mays
  VARIANT 7: note = Ancestral polymorphism is N, Derived polymorphism is D
MADVTRNGFGGRNPPGLLQNAAKNKHAFVQLFLMTGVLLVSLRTLGQKHLLHDLAADNADLRRQRDGLSHRMRDLQDALRTEAGADSSGALASHLRRIFTAHPAPAAAAEDQ

SEQ ID NO: 21124 - protein, 116 aa, Zea mays
  VARIANT 4: note = Ancestral polymorphism is L, Derived polymorphism is P
  VARIANT 12: note = Ancestral polymorphism is L, Derived polymorphism is F
  VARIANT 18: note = Ancestral polymorphism is V, Derived polymorphism is M
  VARIANT 24: note = Ancestral polymorphism is D, Derived polymorphism is N
  VARIANT 31: note = Ancestral polymorphism is L, Derived polymorphism is F
  VARIANT 32: note = Ancestral polymorphism is P, Derived polymorphism is L
  VARIANT 55..116: note = Derived polymorphism lacks residues 55 to 116
  VARIANT 64..116: note = Derived polymorphism lacks residues 64 to 116
  VARIANT 68: note = Ancestral polymorphism is A, Derived polymorphism is V
MNVLNPYVRQILVGWITVLDSVPDIDMLGFLPDFLDGNPSLFPSALIFYTSIDRSTTFLSPPLQTVEAVLIFAKMLDLWLSFKVQINEFVKLGGEQLVPYYADILYARYGCNVKYN

SEQ ID NO: 21125 - protein, 306 aa, Zea mays
  VARIANT 243: note = Ancestral polymorphism is F, Derived polymorphism is L
  VARIANT 207: note = Ancestral polymorphism is D, Derived polymorphism is N
  VARIANT 178: note = Ancestral polymorphism is F, Derived polymorphism is I
MTITIEQPQLDAVAERKVPGGGDPAELVLDAGFVVPDANAFGNTFRDYDAESERKQTVEEFYRVNHVRQTHEFVARMRAEYGRLDKTEMGIWECIELLNEFIDDSDPDLDMPQIEHLLQTAEAIRKDYPDEDWLHLTGLIHDLGKVLLHPSFGELPQWAVVGDTFPVGCAYDECNVHFKVYFKENPDYHNPKLNTKLGVYSEGCGLNKVLMSWGHDDYMYLVAKENKCTLPSAGLFIIRYHSFYPLHKHGAYTHLMDDEDKENLKWLHVFNKYDLYSKSNSRIDVEEVKPYYMSLIDKYFPAKLRW

SEQ ID NO: 21126 - protein, 471 aa, Zea mays
  VARIANT 103..471: note = Derived polymorphism lacks residues 103 to 471
MVGAMRGGAMELEDRLATLPRFRGDHDDDGKERRTGTVWTATAHIITAVIGSGVLSLAWAMAQLGWVAGPLTLVLFAAITFYTCGLLADCYRVGDPVTGKRNYTYTEAVKSNLGGWYVWFCGFCQYVNMFGTGIGYTITASISAAAINKSNCFHWHGHDADCSQNTSAYIIGFGVVQVIFSQLHNFHKLWWLSIIAAIMSFSYSAIAVGLSLAQIVMGPTGKTTMTGTLVGVDVDAAQKVWMTFQALGNVAFAYSYAIILIEIQDTLRSPPAENKTMRRATMMGISTTTGFYMLCGCLGYAAFGNAASGNILTGFGFYEPFWLVDFANACIVVHLVGGFQVFCQPLFAAVEGAVAARYPGSTREYGAAGLNVFRLVWRTAFVAVITLLAILMPFFNSILGILGSIAFWPLTVFFPVEMYIRQRQVRRFSTKWIALQSLSFVCFLVTAASCAASVQGVVDSLKTYVPFKTRS

SEQ ID NO: 21127 - protein, 442 aa, Zea mays
  VARIANT 218: note = Ancestral polymorphism is S, Derived polymorphism is L
MVLAMSRAARAASRLVPEIPMLRRSSKQAAAAAEEVAVPAQFVCPISLDLMRDPVTAPTGITYDRESVEGWLARGNARCPVTGRPLRLADLVPNHATRRMIQDWCVANRASGVELVRTPKVPLSDAAAAEAVATVSAAARRGDAAACGAAAARARALGKESDRNRRSLVAAGAARALAAAFGRLAGERAGALGDVLAALTVFFPLDDEARRCIASPASLKSLVSAMSHGELPARAGAAVVLREVASSADAHTLEAVLRTPGMCDALVDLVRNPVSTQATKAALVTAYYLAAASDRAAARLAECGAVSVLVEALVDADKGTSEKALAALDGVLCADAGLAAARAHALAVPVLVKKMFRVSDMATDFAVSALWRLCRAGDAAAAACRAEALRVGAFQKLLLLLQVGCGGVTKERASELLKMLNGSKGSVECVETVDFKGLKRPF

SEQ ID NO: 21128 - protein, 557 aa, Zea mays
  VARIANT 115..557: note = Derived polymorphism lacks residues 115 to 557
MCTTPVPSPLPVALVGVKGDHRVYVTVPQHPEGDVAVHRSRQFMCRAVPLPTAGETFREAVALCRLAFPIALTALLLYSRMALSMLFLGTIGDLPLAAGSLAIAFANITGYSVLSGLSLGMDPLCSQAFGANQPRLLGLTLYRSVLFLFCCSLPLTALWLNMSRILVFLGQDIEITALAQEYILFSLPDLFSFSLIHPLRVYLRSQGITWPLAAAAGAAVLFHAPTNYVLVGRLRLGAPGVAAAASASNFVLLGVLLACVVGRRDSGLRAAGPPTAECLAGWGPLARLAAPSCVSVCLEWWWYEVMILLCGLLPDPKPAVASMGVLLQTTALVYVFPSSLGFGVSTRVGNELGANRPGHARAAAHVAVAGAACMGLAAMSFAAGVRHTWGRMFTADPDILRLTAAALPVVGLCELGNCPQTVGCGVLRGSARPTRAAHVNLGAFYLVGMPVAVLLAFGLGVGFVGLWIGLLAAQVCCAGLMLFVVGSTDWEAQARRAQELTSCAVGEMEKTGAHASATTEAGGRPEKGEQEEGVERRHDDYEPLMISNSGEPEPETV

SEQ ID NO: 21129 - protein, 414 aa, Zea mays
  VARIANT 122: note = Ancestral polymorphism is T, Derived polymorphism is M
  VARIANT 132: note = Ancestral polymorphism is R, Derived polymorphism is W
  VARIANT 177: note = Ancestral polymorphism is M, Derived polymorphism is T
MWPGCGGRFYWAPESAPPGQARGVAVLFAWVWSDEAQLRPFVELYSSLGWRCLVCHPDLVALYLSEKATSLATGVISELVKELRVKPVPTVLASFSGGSKGCMYKVIQLLAGICEGDATMDTWRLSNKKDYRLVRNCICGQIYDSSPVDFVSDVGTQFLQKPAVGNLSQSTILRSWMAKVLASGMDTLFPSRIEAQRAEYWHTLYSAAGLGPVLIFCSEDDNLAPCHIICGFARRLIELGTDVKLMKWSDSQHVGHYNSHEIEYRKAVDDTLKKALVTFCHRSQLYDSNMAGDQEYKIAHSVCSLHNAAANSNESLRRVANSPSDHFFLPSSKDHDESREPSSLIEDQRRHISHPPCMEPKGVLGQILFDVCVPNNVEGWDIKPTVSPNGRPTFASARQLGPFNPIRYFRRSRL

SEQ ID NO: 21130 - protein, 98 aa, Zea mays
  VARIANT 10: note = Ancestral polymorphism is P, Derived polymorphism is L
  VARIANT 21: note = Ancestral polymorphism is A, Derived polymorphism is V
  VARIANT 31: note = Ancestral polymorphism is D, Derived polymorphism is Y
  VARIANT 41: note = Ancestral polymorphism is H, Derived polymorphism is N
  VARIANT 59: note = Ancestral polymorphism is V, Derived polymorphism is L
  VARIANT 63: note = Ancestral polymorphism is D, Derived polymorphism is V
  VARIANT 65: note = Ancestral polymorphism is D, Derived polymorphism is V
  VARIANT 66: note = Ancestral polymorphism is R, Derived polymorphism is H
  VARIANT 67: note = Ancestral polymorphism is D, Derived polymorphism is V
MAFMRYRALPQGELTVEGFRAWLAQFDADRDGRISREELQHALRSLNVWFAWWKARGAVRAADADRDGGVQLIGEDEVARLFAFAQTHLHVKIAQLGY

SEQ ID NO: 21131 - protein, 101 aa, Zea mays
  VARIANT 27: note = Ancestral polymorphism is E, Derived polymorphism is K
  VARIANT 39: note = Ancestral polymorphism is G, Derived polymorphism is R
  VARIANT 67: note = Ancestral polymorphism is G, Derived polymorphism is R
  VARIANT 79: note = Ancestral polymorphism is R, Derived polymorphism is Q
MLSKETNRIRAKRLHEGGGTGAVTTEERSPGPLACLERGRQQEMDEIMNKVGVYWMGPPANKEISAGDDLEVFTLDQCRGWSGMAGEKVEGQDAEATGGPA

SEQ ID NO: 21132 - protein, 280 aa, Zea mays
  VARIANT 183: note = Ancestral polymorphism is S, Derived polymorphism is L
MAPPDSISTCSSLPLAAAPMSEPTPFPFAASPLPNPLVATASFLQHHLSRLASHLNVPRPALAAAAARTPGPQGASLSLSLAPDEVARALTGTPVFTVCNSSNEFVLVSDPATGLRSLGLLCFRSEDADALLSHVRTRQPVLGKGAKVVPITLDQVYMLKAEGIAFRFLPDPLQIKNALEMKSGLTAFDGVPVFQSDLLVVKKQKKRYCPVYFQKEDIERELTRASKGSRGSALSKKIMVGSLEDVLKKMEINERDSGWDDLIFIPPGKSLNQHINEVSA

SEQ ID NO: 21133 - protein, 297 aa, Zea mays
  VARIANT 37: note = Ancestral polymorphism is A, Derived polymorphism is T
MEHKDGGTASASGLPAGSSLCSGSPLLDAPLLRRLYAGQILARWGARMWEFSVALYMIRIWPDSLLFAAIYGVVETSSLVVLGPVVGTLVGRATYLQVLGIWLLSQSISLIVAGTSVTTLLMYANLRATRFPAFMALVAVTNVSGALAALSALAGTILIERECLASTQASAAVLALSTAASAGLQYCLFVSVYNGVPALAAPRQPRASDAERPPPVPMTVAPAEAEPTQALDWRARLADKLSVASGWESWVVYARQDVALPGVALAFLYFTVLRQAKLAASHSALNPATAHSHRYDE

SEQ ID NO: 21134 - protein, 557 aa, Zea mays
  VARIANT 139: note = Ancestral polymorphism is R, Derived polymorphism is H
  VARIANT 337..557: note = Derived polymorphism lacks residues 337 to 557
  VARIANT 419..557: note = Derived polymorphism lacks residues 419 to 557
MDSAKAIKGARDVPEAEKRRPTGLGTVTAVFLLSLPLLLLLFLFGDRAVASIAGDSLVWQRAEVQRSGNASSSPENAHHDLLLGGLLSPDFDAATCLSRYEASRRWKPSPFPVSPYLVQKLRQYESNHQRCGPGTANYREAMGQLMSGRNGGRAECRYVVWFPLQGLGNRMLSVVSTFLYALLTGRVLLVHEPPEMEGLFCEPFPGTSWILPPGFPYTGGFWARSNDSYLSMLENDVVRYDDDRGDASALLPPYVYFHLEQIRLRLQKHTFCEEDHRVLDRFNWMVLRSDSYFAVALFLMPMYRAELDLMFPAKGSVFHHLGRYLLHPGNRAWGVVERFYDGYLAGADERLGIQVRLVPFLSLTFEGMYEQITRCAREHDLLPRVTGTSEPPGARPSPNGTAATARVKAVLVVSLKPEYYDKLHRVYYTNATATGEVVAVYQPSHDQEQHTEARAHNERALAEIFLLSYSDRLVTTGFSTFGYVAHSLAGLQPWLLMLPDQTTKRAAVACVRAASVEPCLHSPPSLVCRAEQDLDPVAHMPFLRRCEDVDFGLKLFD

SEQ ID NO: 21135 - protein, 96 aa, Zea mays
  VARIANT 58: note = Ancestral polymorphism is D, Derived polymorphism is N
  VARIANT 56: note = Ancestral polymorphism is R, Derived polymorphism is C
  VARIANT 54: note = Ancestral polymorphism is K, Derived polymorphism is N
  VARIANT 45: note = Ancestral polymorphism is F, Derived polymorphism is I
  VARIANT 38: note = Ancestral polymorphism is E, Derived polymorphism is K
  VARIANT 26..96: note = Derived polymorphism lacks residues 26 to 96
MLIDVAIEKVQGLISFFEGYRETGFLEALESVKEIALEIDIGTTFPKKRQIKRKRRYDENPEDTNITTMSREDLFRVEYFVPLVDQAIASLTTRFE

SEQ ID NO: 21136 - protein, 317 aa, Zea mays
  VARIANT 88: note = Ancestral polymorphism is A, Derived polymorphism is D
MARAHLALVSFFAASIIGAASKSFTIANNCEHTVWPGILSSAGSAGVDTTGFALAPGESRALSVPSGWSGRLWGRTLCSTDAATGRFACVTGDCGSGRQDCGGGGAAPPATLAEFTMDGSGGMDFYDVSLVDGYNLPMLVAPQGAAAAAGGSCVPTGCMADLNGACPADLRVAASTTSSGGGGVACKSACEAFGSAQYCCNGDYGNPSTCKPSAYSQFFKNACPRAYSYAYDDATSTFTCAGDTAYAITFCPSTTSVKAAGGSPQAQGALPLMNATMVYLGGDQVGSATAAARLPSGLLHHVVVLAVVSLALAGALY

SEQ ID NO: 21137 - protein, 298 aa, Zea mays
  VARIANT 100: note = Ancestral polymorphism is D, Derived polymorphism is Y
  VARIANT 50..298: note = Derived polymorphism lacks residues 50 to 298
MTEVSFNWIGFWSAMTSNLMNQSRNVYSKKILADKELLPRIASLPLNFVQLIFPFVDLDIKYFDLGLPHRDATDDKVTVEAAEATLKYNVAIKCATITPDEARVKEFGLKAMWKSPNGTIRNILNGNVFREPIICRNIPQLVPGWTKPICIGRHAFGDQYRATDAVIKGPGKLKLVFEGKEEQVELEVFNFTGAGGVALSMYNTDESIHAFADASMATAYEKKWPLYLSTKNNILKKYDGMFKDIFQEVYEAGWKPNLKLPAYGIVSNPVSYPIFFFNKVFWLIGFDDFGTGNCQFSK

SEQ ID NO: 21138 - protein, 564 aa, Zea mays
  VARIANT 430..564: note = Derived polymorphism lacks residues 430 to 564
MQLEAMDGNNKRARWMVGAALTAVVVVVVTTVLILGGRNVGGAPATARVWAAVASFRQGSIDLSSSPPAAARHDDRLYNGLLTDSFDEESCHSRYQSAMYRGKPGRRPSAYLISKLRRHEALQRRCGPGTTAYSNALEQLRAGSMSTIAPPECAYIVSISYSGLGNRILAAASAFLYAVLTDRVLLVDPSNDMDDLFCEPFPGTTWLLPPGFPVANYTGFGVDTAESYGNMVRNKVVVESGGVADAASTAGRRLPLPAFAYVHLHNDATVEDNYFFCDGDQRLLRRVQWLAVRTDSYIVPGLFLVQAFQGELDRMFPERDAVFHHLGRYLFHPSNHVWGLVTRYYDAYLATAQQRVGIQVRVFGAQPNSPELLEQITSCTQKQKLLPELRLATGEPTPPPPPVPASRARSKAVLVTSLKSWYYEKLKSMYWEHAAATGEAVSVHQPSHEEYQRSGARSHEHKAWAEMYLLSLTDVLVTTGVSTFGYVAQGLAGVRPWVLYKSTNSSAVPDPPCGWDVSMEPCFHKPPSYDCRLKQWTADISKDVPYIQHCHDLTWGLKLVGRNK

SEQ ID NO: 21139 - protein, 163 aa, Zea mays
  VARIANT 17: note = Ancestral polymorphism is A, Derived polymorphism is V
  VARIANT 22: note = Ancestral polymorphism is T, Derived polymorphism is I
  VARIANT 25: note = Ancestral polymorphism is I, Derived polymorphism is T
  VARIANT 30: note = Ancestral polymorphism is G, Derived polymorphism is D
  VARIANT 54: note = Ancestral polymorphism is G, Derived polymorphism is D
  VARIANT 71: note = Ancestral polymorphism is G, Derived polymorphism is A
  VARIANT 74: note = Ancestral polymorphism is P, Derived polymorphism is L
  VARIANT 98..163: note = Derived polymorphism lacks residues 98 to 163
  VARIANT 115: note = Ancestral polymorphism is H, Derived polymorphism is D
MPATIRNLAQLTTLILAGCSFIGGIPQQLGNLQQLSFLALNSNKFTGTIPPTLGLLSNLFWLDLADNQLTGSIPVSTATTPGLDQLTDTKHFHFNKNQLSGTLTGLFNSNMSLIHIRLDRNNLKGTVPPNISNLVNLNELNLASNQLTGSLPDLSSMTKLNVV

SEQ ID NO: 21140 - protein, 424 aa, Zea mays
  VARIANT 82..424: note = Derived polymorphism lacks residues 82 to 424
  VARIANT 40: note = Ancestral polymorphism is S, Derived polymorphism is I
MLLTFSWYQGFRDVTRTALDFLAPRDAGSIGSPVASTSGSSFCFCVHELSLNKAWVNIYGVPYEIRSFLPLWAVGTIIGATQKVDLRYTKRMGVVRLLVGVTNIDKIPESVDIVVGEGLYEIFFKIDKVCKDGVWSEYYYPSDKKDYDFESKDEVFDGLDDIQPKFDDTTKDTVMKDVSGSKVDNSSNVQHATQQNCDIRQTDALEKCLVAVNRSSIFKENVAAPTAVAHGVVYDNNWTEAEGTIILNAKQTAQQRGEFSRTGGPSSYLASMVQLNEGITSHINSHSLHCSDMPQIYLVAAPRAAESRKNTVVPFDVVSRTVGREGPVDADAFNLNTICHDSRKKAVVPFVVVCTADASEGSVDANSICLNSIPSVPASATAVYPISLADINTDLNSVAIDFSPATNIHAAIPNVSVEQIHEHA

SEQ ID NO: 21141 - protein, 575 aa, Zea mays
  VARIANT 39: note = Ancestral polymorphism is S, Derived polymorphism is R
  VARIANT 139..575: note = Derived polymorphism lacks residues 139 to 575
  VARIANT 145..575: note = Derived polymorphism lacks residues 145 to 575
  VARIANT 182: note = Ancestral polymorphism is S, Derived polymorphism is F
  VARIANT 186: note = Ancestral polymorphism is R, Derived polymorphism is L
  VARIANT 194: note = Ancestral polymorphism is A, Derived polymorphism is V
  VARIANT 198: note = Ancestral polymorphism is A, Derived polymorphism is T
MNRVLTADDGKRWNWGASALLTAFVMTVPTLVVILLGGSTAGAPLVWVRTAMAGFRQETSTPEVMIQSSFVLTFASKRSAGPDDFSFPYTSTRTVHDRLHGGLLAAGFDQEACHSRYQSAMYRRNPGRRPSEHLVSKLRRHEALQRRCGPGTAAYSSALEQLKSGKNAGASPADPDCRYLVSISYRGLGNRILAAASAFLYALLTDRVLLVDSSNEMGELFCEPFPDTTWLLPWRSFPLWNFSFDTQERYGRMRENGVLRTNDDVGSSSPAEVVPPAFAYIHLDYNHTAYDQLFFCDDDQRLLSSFQWLVMRTDSYIAPGLFLVESFQEELDMLFPEREAVFHHLGRYLFHPTNHVWGLITRYYRANLAWAQRRVGIQVRVFPWEPDSPELLERITKCTQEEGMLPGLVETEEPAAAATTASGAKSNAVLITSLKAWYYEQMKGMYWENATANGEVVVVNQPSHEEYQHYGVKSHEYKAWAEIYLLSLTDMLVTTGKSTFGYVAQGLAGLRPWVLLKQANGTAGHGWCSRDMSLEPCFHIAPSYDCKRRHDSGEIVPHVRHCEDVPTGLKLVDPN

SEQ ID NO: 21142 - protein, 314 aa, Zea mays
  VARIANT 295: note = Ancestral polymorphism is S, Derived polymorphism is F
MAAAAPEAADEVAPSATLSVYKAARCIKRRASTLYNALRSVAEDAAFVAEVAALWPSLPLVANLRCGLWNLEPEFKSSTLLNGDAENNSDLSNWDSSVHLPVWVLGTEKNAIEGRIDEWTDQFESCGADIHSLAVGLQKPLRPLWISQRTRIWLNEVPELESWDFTPIILISASDAVATQRMSSEFSWHYIPGAGDDEESWARGLTPTLFWKHSYDLIDAGPDRCNQIVADIVEKDRVYRAQRGEHCPQITCKSLRSLAGAKCNDDQTTEMCAMNLDHCTSTRYATTVLIMAFYSFGLEHQTLQYHLLSMLQVP

SEQ ID NO: 21143 - protein, 105 aa, Zea mays
  VARIANT 17: note = Ancestral polymorphism is A, Derived polymorphism is T
  VARIANT 41: note = Ancestral polymorphism is A, Derived polymorphism is S
  VARIANT 69: note = Ancestral polymorphism is R, Derived polymorphism is S
  VARIANT 72: note = Ancestral polymorphism is F, Derived polymorphism is S
MRNLPKAVDFAKRNLMAGRKILVCCQNGEDISICVALAILALLFDDNGCFDYGNYFVKRDVTKLEMRRRLVFICKFAVNARPSRGNLKQVYGFLSSQKELLSCLT

SEQ ID NO: 21144 - protein, 299 aa, Zea mays
  VARIANT 224..299: note = Derived polymorphism lacks residues 224 to 299
  VARIANT 176..299: note = Derived polymorphism lacks residues 176 to 299
MGFSFMSFGSPQSDGDSSKKPYFTLGKNLVLGRPGDSPSPRASPRPPSPRAPPSPRLLSRHLREHLRCRISSAAISTSTSAASPTYSPTLSPFPRQGCQYTNEIVPGSVSTNWKKMYRKLTGNWECRSIQECVCTKSQSLGTNSLDLDGQETTSVFNLSSDAQYVPVNTNEPTEAQFVPSNQESSQREGGSGRKCKQSHVGLALESYVEFKKIQNTETLETLKEHKRQEDQFSISKCQVELKGMDGLTTMNKSYALELFVSATNREMFLTTTEHDVREIWLKRKIRLLRGSDAWTEQMI

SEQ ID NO: 21145 - protein, 57 aa, Zea mays
  VARIANT 3: note = Ancestral polymorphism is L, Derived polymorphism is P
  VARIANT 6: note = Ancestral polymorphism is A, Derived polymorphism is V
  VARIANT 12: note = Ancestral polymorphism is S, Derived polymorphism is F
  VARIANT 15: note = Ancestral polymorphism is E, Derived polymorphism is K
  VARIANT 25: note = Ancestral polymorphism is P, Derived polymorphism is S
  VARIANT 26: note = Ancestral polymorphism is L, Derived polymorphism is P
MFPGPVCCVLSFGTEANELAMLMAPLYSGNLSMVALGNAYHGGSAGTIGLTGLQTYT

SEQ ID NO: 21146 - protein, 529 aa, Zea mays
  VARIANT 64: note = Ancestral polymorphism is S, Derived polymorphism is F
MATPPLLFLLGGRLGAPVVWIRSTVASVGASQTVAAAESKKDALLGGLLLPGFDEQTCASRYQSVYYRKNLTRQPSPYLIKRLRDQEALQRRCGPGTEPYARASERLRSGQTGAVDNDDDGGGCRYLVLISYRGLGNRMLAITSAFLYALLTRRVLLVDRGYGNTLPDLFCEPFPGTTWALPLDFPLDKEFRDLDETAPESYGNVAVNRSGSVSGMRFVYLHLDHAASQANRLVYCDDDESFLRRMQWAILRTDQYMVPGLFFNPTHQGELDRLFPRKDSVFYLLSRYLLHPTNDVWGMVTRYYNAYLSGADERLGIQIRVLFGGDKPAQHVLDQILACTSRERLLPGVVTTQGPAPAPPLPAAAGARARRRSKAVLVTGLSGWYHDSIREMYWESPAADGEVVSLFQPSHEEHQLWYQNKHDMKAAAEIYLLSLTDNIVTSAWSTFGYVGYALGGLRPYLMFLPENQTAPDPPCTRAMSMEPCSHGAPSFECTRKEIGTIINTGLLLPHVRACEDISWGLKLTDPDEV

SEQ ID NO: 21147 - protein, 257 aa, Zea mays
  VARIANT 42: note = Ancestral polymorphism is T, Derived polymorphism is I
  VARIANT 95..257: note = Derived polymorphism lacks residues 95 to 257
  VARIANT 145..257: note = Derived polymorphism lacks residues 145 to 257
MSEAPKDSMEVDLVQKTEKVKVTGHLKKLRLQGKHLKWKLQTIGEDAEAASVSKESSQQVDDIEQAYTQKEESVSDLPTEIETLHSDAIIKGLPQKAPDNMQTGIATAPKQSHNRGDNDVFEAVTEVPSTAQDHSEDDVRVEVPEEHTVSPVLQSQTPGEKPVLVVDVPAAAGSATPEHAEAESNKVEENHVNVEPGRKNNESDHGVVPSDKEIQNNVLGDMEESSEEHEGDGAPAVDQPNNIAEMLPQTGEQFSDS

SEQ ID NO: 21148 - protein, 78 aa, Zea mays
  VARIANT 73..78: note = Derived polymorphism lacks residues 73 to 78
  VARIANT 63..78: note = Derived polymorphism lacks residues 63 to 78
  VARIANT 51: note = Ancestral polymorphism is I, Derived polymorphism is N
  VARIANT 43: note = Ancestral polymorphism is E, Derived polymorphism is K
  VARIANT 23: note = Ancestral polymorphism is P, Derived polymorphism is L
  VARIANT 18: note = Ancestral polymorphism is G, Derived polymorphism is A
  VARIANT 9: note = Ancestral polymorphism is R, Derived polymorphism is C
MENKPKGSCIAEGRWHSGTQIALAKKLNLNHHIIGGELLELSENEVPPEDIVFHRFYLNKTAQLSIRQSGRTQFLMKE

SEQ ID NO: 21149 - protein, 145 aa, Zea mays
  VARIANT 111: note = Ancestral polymorphism is P, Derived polymorphism is H
  VARIANT 44: note = Ancestral polymorphism is D, Derived polymorphism is A
MNTNSDKLKQTYNVLLEFKLVLSKAGHILASSHSHATSAEHELDENIYDNGIHEGNAYLLEQGVHQGAHGHSGVRFVSAIILKSKALAFERMLFRATRGNMLFNQASAGEPVTDPISGEEVEKVVFVVFFSGEQAKAKILKTRVC

SEQ ID NO: 21150 - protein, 161 aa, Zea mays
  VARIANT 82..161: note = Derived polymorphism lacks residues 82 to 161
  VARIANT 101..161: note = Derived polymorphism lacks residues 101 to 161
MDIFDRGGGGAGALDRPLQCNKPRGPEPSGTTRTRPVQYPCIKSKAHLPAPLTFFSPLSPDIADPKWKREGGFKNGYCSVLENELKARLPGCGLSAIPHIESRVRHFRTKYGAIEVMLAKSGFIWDDNRKMVQCEKQQYEAHCKSEDFLDVVIGCQLTVHR

SEQ ID NO: 21151 - protein, 131 aa, Zea mays
  VARIANT 40..131: note = Derived polymorphism lacks residues 40 to 131
  VARIANT 58: note = Ancestral polymorphism is G, Derived polymorphism is R
  VARIANT 80: note = Ancestral polymorphism is S, Derived polymorphism is F
MEKEIATGEDCQVVNSDHSTSSSSKRRKKHKDSMSSDPFLDLASGIRGDLNKASQHFGRMVEVMEMEAKKDQMQELQEKSVVELTRLGFGGSELLKVVAVFVKVPNQMTILFTLPETLRREFILNMIADNN

SEQ ID NO: 21152 - protein, 477 aa, Zea mays
  VARIANT 90: note = Ancestral polymorphism is S, Derived polymorphism is Y
MARRSKHLGQGVVETNLPYCFFRLGMSWPLEFDDQQSRGMGGRGWPRTITTSLDVAQDLGAARPPEPSRGTFVDSSCHYVTRVCRSGDVSVLNLLVPHKWIGVNMLHHSNSRNQRNRGSRIKTLLQATLLSGVVFWLLYQVKHSYDKKNEYLDDAEDQLTHNDRSIFQARKQKAGSYSDSNVQMVVDNSDVTTKPEEGDVDHHSDTFDHNEKTVETVFDKDSTNLHEDDKRNTESSEAEGQVNSGDSNTEANNNKNEDETTSLVEGRKHDTESNSAAESKSEVNSTGDELSQNNHAQEENTREASGMSHDEVAHGDESTSASGTWNGSDGEGEKKEAVDTQTGSETLPDDAKTEATDDRGTNSLSDETGNIPSVHTDNSQNDASENQGDATSTTSDSSEHGISEAVHIETGLEHGSATTSSVTGSETSTNGEQVDPKTETSTSTSNVHNESQGADGSSGSNNSIGNGPEQTGKTERQ

SEQ ID NO: 21153 - protein, 223 aa, Zea mays
  VARIANT 47..223: note = Derived polymorphism lacks residues 47 to 223
  VARIANT 48..223: note = Derived polymorphism lacks residues 48 to 223
  VARIANT 81: note = Ancestral polymorphism is C, Derived polymorphism is R
  VARIANT 84: note = Ancestral polymorphism is C, Derived polymorphism is R
  VARIANT 142: note = Ancestral polymorphism is G, Derived polymorphism is D
  VARIANT 147: note = Ancestral polymorphism is H, Derived polymorphism is Y
  VARIANT 148: note = Ancestral polymorphism is P, Derived polymorphism is L
MAMAAPFLATASNNIGSASNGEIKRRQTSADALQRTVSDVSHELHHQQHGVNDNNQEKKAAEAEKHQQLLHPGPEVQDAKCECCGMSEECTTEYIRGVRGRFSGRWVCGLCAEAVTEEAEKNGGTLEEALKAHMGVCKRFNGFGRTHPVLFQAEAMREILRRRAKLGPRSRSSINHREVREADKAGSGRTGIARCSSCMPSITDDFNEGVVDQQKLILDRLVD

SEQ ID NO: 21154 - protein, 252 aa, Zea mays
  VARIANT 178: note = Ancestral polymorphism is A, Derived polymorphism is T
  VARIANT 177..252: note = Derived polymorphism lacks residues 177 to 252
  VARIANT 153: note = Ancestral polymorphism is G, Derived polymorphism is S
  VARIANT 113: note = Ancestral polymorphism is Y, Derived polymorphism is N
  VARIANT 106: note = Ancestral polymorphism is R, Derived polymorphism is W
  VARIANT 101: note = Ancestral polymorphism is P, Derived polymorphism is R
  VARIANT 84: note = Ancestral polymorphism is V, Derived polymorphism is F
  VARIANT 83: note = Ancestral polymorphism is R, Derived polymorphism is H
  VARIANT 63: note = Ancestral polymorphism is P, Derived polymorphism is T
  VARIANT 62: note = Ancestral polymorphism is T, Derived polymorphism is K
  VARIANT 60: note = Ancestral polymorphism is S, Derived polymorphism is A
  VARIANT 50: note = Ancestral polymorphism is A, Derived polymorphism is V
  VARIANT 34: note = Ancestral polymorphism is Q, Derived polymorphism is K
  VARIANT 32..252: note = Derived polymorphism lacks residues 32 to 252
  VARIANT 28: note = Ancestral polymorphism is I, Derived polymorphism is V
  VARIANT 12: note = Ancestral polymorphism is G, Derived polymorphism is R
MESNTTPFAAVGTAAEEASTRRVANRIIRALQHQLRLLHRAGAEFFVLGVTGNVYTVTLSTTPACTCPDPAVPCKHILFVLLRVLGLSLDEACVWRQTLHPCQVARLVGTPTYPDVLAGARARERFHQLWSARPANNVADDRQEASSHRPLDGAACPVCLEEMAPAQPSQGSGATAQAILTCRTCRNAVHAECFTRWKRSRSRRAATCVVCRSRWKKPNREHEHEQYMNLAAYMNDDGDVTMLSADGWLCAG

SEQ ID NO: 21155 - protein, 90 aa, Zea mays
  VARIANT 15: note = Ancestral polymorphism is S, Derived polymorphism is F
  VARIANT 22: note = Ancestral polymorphism is A, Derived polymorphism is S
  VARIANT 30..90: note = Derived polymorphism lacks residues 30 to 90
  VARIANT 40: note = Ancestral polymorphism is K, Derived polymorphism is N
  VARIANT 57: note = Ancestral polymorphism is D, Derived polymorphism is Y
  VARIANT 62: note = Ancestral polymorphism is V, Derived polymorphism is A
  VARIANT 71: note = Ancestral polymorphism is H, Derived polymorphism is D
MQNMDNGKLKFCLQSFASFSVSNRTIMALWKARSLSTEINVQLAEEQSQINTLQSEYIGVFVGIEEAKSLHMTNMVSIMEVFAGGSLEMK

SEQ ID NO: 21156 - protein, 171 aa, Zea mays
  VARIANT 22..171: note = Derived polymorphism lacks residues 22 to 171
MCAWCRLLFSVGGGGYGGGGGYGGYGGGGGGGGGGYGGGGGGGGGGYGGGGGYTPGYSGTGTCDYWKSHPDAIISCIGSLGSILGSFGDVCSAFFGSKLQTLQDALCNTRTDCYGDLLREGAAAYLNSIAAEKYAYSTQQVQDCIAVALTSKAAAVAQAAMFKKANYACSY

SEQ ID NO: 21157 - protein, 134 aa, Zea mays
  VARIANT 19: note = Ancestral polymorphism is G, Derived polymorphism is R
  VARIANT 26: note = Ancestral polymorphism is L, Derived polymorphism is P
  VARIANT 29: note = Ancestral polymorphism is V, Derived polymorphism is L
  VARIANT 33: note = Ancestral polymorphism is L, Derived polymorphism is W
  VARIANT 34: note = Ancestral polymorphism is L, Derived polymorphism is S
  VARIANT 36..134: note = Derived polymorphism lacks residues 36 to 134
  VARIANT 59: note = Ancestral polymorphism is C, Derived polymorphism is R
  VARIANT 73: note = Ancestral polymorphism is E, Derived polymorphism is K
  VARIANT 101: note = Ancestral polymorphism is N, Derived polymorphism is Y
MDAAAHIISSTAVKKLSSGLYRVSCLSKVSYKLLFSRGNMVGKDHPVPAISKSEFTVICDFPSEITLKANKNENRLDILEAARKADRGPDRLQASPIVISNGRNIRLTAASIHVNGRFFANSSSLRLNTFYQFR

SEQ ID NO: 21158 - protein, 187 aa, Zea mays
  VARIANT 11: note = Ancestral polymorphism is I, Derived polymorphism is K
  VARIANT 33: note = Ancestral polymorphism is P, Derived polymorphism is L
  VARIANT 145: note = Ancestral polymorphism is A, Derived polymorphism is G
MANDSLTRGHIIGDVLDPFTSSVSLSVLYDGRPVFDGMEFRASAVSVKPRVEIGGDDFRVAYTLVMVDPDAPNPSNPSLREYLHWMVTDIPASTDDSFGRELIPYESPSPTMGIHRLVLVLYQQLGRGTVFAPQVRQNFNLRNFARRFNLGKPVAATYFNCQRQTGTGGRRFTCVFDHVVQGEGRQA

SEQ ID NO: 21159 - protein, 695 aa, Zea mays
  VARIANT 79..695: note = Derived polymorphism lacks residues 79 to 695
MCELMETELRFMTVNDAEQYTMSSLELLEHSLEEATGSMKVECMQKEPPLIVMVLKVHMHCKAYAEGIWKRILNMKGVQSIELDLKALEVSLMSIKVWRLEAVVAELECRNYELFSEKGELEKKLVAVEEVIQMVSKEKEGVAKALDVEKRSELEPFTADMAGTDRLYPEIGTYDLEPPQVPASAGGSGEEEAGVCDALVMWDDESDACPSHEAAPIIFEKGTRDPPPKVFKEERLDVVHYSEFSDEMATEKEFGENNYDSFPSCEQTGIIWVPPSVPPMPKHDHDEWQKGFGYNSPCFPEEEYKWDIDEENLEMTMWDVLSEMVVAGKDKILSIASFDLGMYGTSMISDFCLEETLKDKAQTLKDVSAGSEHALLETELTKWLPDSASTSCMLCGARFHPIICARHHCRFCGGIFCGGCSKGRSLMPPKFMNSDPQRVCDVCGVRLECIQPYLMNRFSRACQLPTQDLTDLSTLRSWINTPWAVRMEYEIYKAANSIHGYCKVGELKPEKSIPDSILRQAKGLAIITEVKVGVMLTYKIGTGLVVARRGDGSWSPPSAISTCGLGYGVQAGGELADYIIVLRNKDAIKTFSGNAHMSIGAGVSASAGHFGRVAEADFRAGDGGYAACYTYSCSKGAFVGCALNGSVVSTRDSVNARFYGGPIKASEILLGSLPKPPAAATLYKALSVLFDKIEK

SEQ ID NO: 21160 - protein, 508 aa, Zea mays
  VARIANT 158: note = Ancestral polymorphism is P, Derived polymorphism is L
  VARIANT 123: note = Ancestral polymorphism is P, Derived polymorphism is T
MGSQGQAATNGRGDDTGGGRTQQAAHFVFVPLMAQGHLIPAVDTALLLSTHGAVCTVVGTPASAARVRPTIESARQSGLPVRLLEFPLDYAGAGLPEGADNMDNVPPEHARRYFDAVALLRAPIEAHLRAHARPYPTCLVADFCHPWTTVLAANLGVPRLSFFSMCAFCLLCQHNVERFGAYRGVAHDDEPVVVPGLERRVLVTRAQASGFFREVPGWEDFADYVERARAEADGVVMNTFEEMEPEYVAGYAAARGMKVWTVGPVSLYHQRAGTLAARGRATDVDVDACLRWLDGQEPGSVVYVSFGSIAQADPRQAVELGLGLEASRHPFVWVVKSVDEYDGTVRAFLDDLEARVAGRGLLVRGWAPQVLILSHAAVGGFVTHCGWNSTIEAVTAGLPVVTWPHFTDQFLNQKMAVEVLGIGVSVGITEPLMYRKVEKEIVVSRNVVEEAVRSLMGAGEEADERRRRARALAVKARAAMQEGGSSHRNLLDLVGRFEGVMTKDTKGA

SEQ ID NO: 21161 - protein, 150 aa, Zea mays
  VARIANT 67: note = Ancestral polymorphism is A, Derived polymorphism is T
  VARIANT 49: note = Ancestral polymorphism is C, Derived polymorphism is R
  VARIANT 48: note = Ancestral polymorphism is R, Derived polymorphism is W
  VARIANT 39..150: note = Derived polymorphism lacks residues 39 to 150
  VARIANT 36: note = Ancestral polymorphism is R, Derived polymorphism is I
  VARIANT 31: note = Ancestral polymorphism is Y, Derived polymorphism is H
MELLMEILLWDGGIQLLLGPSGMGEGELKKYMMDWRSRQQFLLEAAHRCQEAGLYDKDVEIHKRVGAFAMALQTINKCLSDAVSAMAWSMLDGESRAAALIHSGNEILETTRNSSEASIQEKDLISKQQTVLRQLEAHPLLQKQYASYLP

SEQ ID NO: 21162 - protein, 217 aa, Zea mays
  VARIANT 26: note = Ancestral polymorphism is G, Derived polymorphism is D
  VARIANT 33: note = Ancestral polymorphism is R, Derived polymorphism is C
  VARIANT 48: note = Ancestral polymorphism is G, Derived polymorphism is D
  VARIANT 70: note = Ancestral polymorphism is T, Derived polymorphism is I
MAAGYRAEDDYDYLFKVVLIGDSGVGKSNLLSRFTRNEFSLESKSTIGVEFATRSLQVDGKVVKAQIWDTAGQERYRAITSAYYRGAVGALLVYDVTRHSTFENVERWLKELRDHTDPNIVVMLVGNKSDLRHLVAVQTDEGKAFAERESLYFMETSALESTNVENAFAEVLAQIYRIVDKRAVEAGEDAASGPGRGEKINIKDDVSAVKKGGCCSS

SEQ ID NO: 21163 - protein, 264 aa, Zea mays
  VARIANT 60: note = Ancestral polymorphism is P, Derived polymorphism is L
MKRPQPQQAAAEQIMALYDACWFRRLVLLASPPPAAAPRPSVPAQQAPVERDELGTTHTPHAQRPASSSPTAGGLRHRRTRSDEATAAAFLGMEPLRLPDRGNRARLQTILSGKDGLVAAPPPERRRPGPGRRRQRRRGRSMSELEFEEVKGLQDLGFTFADAEVDAELASIVPGLRRKRSEEDNNSRATAASTSSARPEAADDASVAAVVAPRRPYLSEAWDSEEEEEVRRALRSWRIPPAGDGNELKEHLRMWAHTVASAVR

SEQ ID NO: 21164 - protein, 182 aa, Zea mays
  VARIANT 81: note = Ancestral polymorphism is L, Derived polymorphism is V
  VARIANT 86: note = Ancestral polymorphism is L, Derived polymorphism is F
  VARIANT 123: note = Ancestral polymorphism is G, Derived polymorphism is S
  VARIANT 136: note = Ancestral polymorphism is A, Derived polymorphism is P
  VARIANT 141: note = Ancestral polymorphism is A, Derived polymorphism is G
MASEKKQSNPMREIKVQKLVLNISVGESGDRLTRAAKVLEQLSGQSPVFSKARYTVRSFGIRRNEKIACYVTVRGEKAMQLLESGLKVKEYELLRRNFSDTGCFGFGIQEHIDLGIKYDPSTGIYGMDFYVVLERAGYRVARRRRCKSRVGIQHRVTKEDAMKWFQVKYEGVILNKAQGNTS

SEQ ID NO: 21165 - protein, 547 aa, Zea mays
  VARIANT 178: note = Ancestral polymorphism is R, Derived polymorphism is G
  VARIANT 260: note = Ancestral polymorphism is G, Derived polymorphism is D
MHRLARPVYTLLNSSMRSGPCGLATDAQGLFNGMPPPKLPSHALFGHACQVLGRTHVSQFCTVARQSTDERASAEPLRFTVTPGDAFGDGPPVGMSEAAKMVCRIVSTQPEPKIASTLDALGVAVSPELVAEVLKNLSNAGMLALAFFRWAERQEGFSYTAEGFHNLIEALGKIKQFRLVWSLVETMRCRGLLSKDTFKLIVRRYARARKVKEAVETFEKMSIFGLKTELSDYNWLIDTLSKSKQVKKAQAIYKEMKRKGKFVPDLKTYTVLMEGWGHEKDLLMVKTMYQEMIDAGIRPDVVAYGMLISAFCKSGKCDEAIKVFYEMEASGCMPSPHVYCMLINGLGSEERLDEALKYFEHYKKSGFPMEVPTCNAVVGAYCRASKFQHAFKMVDEMRKCKVGPNSRTYDVILHYLIKSQKFEEAYNIFQRMGIDGCEPQLNTYTMMVGMFCSNGRVDMALKVWKQMGEKGVLPCMHMFSALINGLCFENRLEEACVYFQEMLDKGIRPPGQLFSNLKEALVQGGRISLAQEVALKLDAIRKTPFRG

SEQ ID NO: 21166 - protein, 531 aa, Zea mays
  VARIANT 103: note = Ancestral polymorphism is N, Derived polymorphism is K
MAMAKSVLAPPVLIFALFCSYYAASMASAQAAASSSDGFLRCLSASIPSQLVFTQSSPSFTTLLKSSIRNPKFFTPSIVRPLYIVTPTNASHAQDAVLCGRQNGMRLRVRSGGHDYEGLSYRSERPEAFAVLDLSNLRAVRVDLQTSTAWVDSGATLGELYYAVGKASNVLGFPAGLCPTVGVGGHFSGGGFGMLLRKYGLAIDNVLDAVLVDARGRLLSKNTMGSDVFWAIRGGGGESFGVVLSWQVRLVPVPATVAVFNVPVPASQGAVDVVTRWQQVAPALPDDLFIRVLVQQQTANFQSLFLGTCDALLPVMGSRFPELGLNRSSCKEMTWIQSVPYIYLGSGSTVEDLLNRTTSASVFSSGYKATSDYVRQAIPRDVWANIFSRLAQPNAGLMILDPYGAQISTVPESATPFPHRAGVLYNIQYMNFWPMAGGGDGAVQTKWVRDLYAFMAPYVSSNPREAYFNYRDLDLGENVVVGNVSSYQAGMVWGHKYFKDNYQRLAVAKSQIDPDDYFRNEQSIPPLANSN

SEQ ID NO: 21167 - protein, 526 aa, Zea mays
  VARIANT 260: note = Ancestral polymorphism is T, Derived polymorphism is I
MATSRPLALALLFCALSACSHAAISYPPSAMSTAAPANNGFLSCLIKSVPPRLLHGKSSRAYGSIWESTVRNVKFVSDKTVKPVYIITPTEAAHIQATVACGRKHGLRVRVRSGGHDYEGLSYRSAKPETFAVVDLSMMRQVRIDGKAATAWVDSGAQLGELYYAVAKMTPSLGFPAGVCATIGVGGHFSGGGFGMLLRKYGTAGDNVIDAKVVDANGTLLDRKSMGEDYFWAIRGGGGESFGIVVSWQVQLVPVPPKVTVFQIHRGVKDGAIDLINKWQQVAPSLPDDLMIRIMAMEQDAMFEALYLGTCKDLLPLMASRFPELGVKQEDCNEMPWIQSVAFIPMGKSATVMDLLNRTSNIKAFGKYKSDYVKDPIPRDVWEKIYTWLAKPGAGVMIMDPYGARISSIPKDATPFPHRQGVLFNIQYVSYWFGEGDGAAPTQWSRDMYAFMEPYVSKNPRQAYANYRDLDLGVNEVVGDVSTYDSGRVWGEKYYNGNFERLARTKAKVDPCDYFRNEQSIPPLLK

SEQ ID NO: 21168 - protein, 393 aa, Zea mays
  VARIANT 109..393: note = Derived polymorphism lacks residues 109 to 393
  VARIANT 97: note = Ancestral polymorphism is L, Derived polymorphism is P
MNRVHSEAAAAAKEQRKNDKREKRKKHKDAKEDDCGASMAEEEAPKEKKQKQKQRKDKDEREEKKKLKPTVSIAVAGSIIDNAQSLELATLVRTPFLVVALVLAYLAARSLTRASLLFQLAGQIARAATVFRIDEVVVFDSTPAAENGSAGDGEESGARFLVRILEYLETPQYLRRRLFPMHKNLKFVGLLPPLDAPHHVRKHEWSEFREGVTLESDPSKGTLVDVGLSKNVLVEQKLEPGKRVTVAMGTNRDLTTACIRKVVPPSTPREQMGSYWGYKVRYTSNLSGVLKNSPFKEEYDHIIGTSEHGQIVNSSELTLPTFRHLLIAFGGLAGLEESIEEDTNLKGKRADDVFTSYFNTCPNQGSRTIRTEEALLISLQYFQDPIRRAEQKL

SEQ ID NO: 21169 - protein, 531 aa, Zea mays
  VARIANT 295: note = Ancestral polymorphism is H, Derived polymorphism is P
  VARIANT 370: note = Ancestral polymorphism is Q, Derived polymorphism is L
MPGILYQLVVAAAICALSSGSIAVASGLNATDSFLVCLVGAGVPPRLLQTPASPSYSTTLLSSVRNLRYVTSDIQRPVAIVAATEPAHAQAAVRCGRRHGVRVRARSGGHDYEGLSYASLDPGERFAVLDLAAFRDVRVDSARAEAWAGSGATLGEVYYAVAAASRVLAFPAGICPTVGVGGHLSGGGFGTLMRRYGLAADNVIDAVLVDADGRLLNRTTMGEDLFWAIRGGGGESFGVVLSWKLRLVRVPETVTVFTVRRSINQSASHLITKWQAIAPALPSDLILRVAVRSQHARFEALFLGRCSRLLEHMRVHFPDLGVTQSDCEEISWIQSTVYFAFYSSSKPLELLLDRSGETPRYVKAKSDYVQEPIPRHVWERTWSWLEKPEAGLLILDPYGGRMGSISPSATPFPHRKGNLYNLQYYSYWFENGTAALEKRMSWVRGLYEEMEPYVSKNPRTGYVNYRDLDLGTNELEDNVTSYARARIWGEKYFKGNFERLAAVKAMADPNDFFRNEQSIPPLPAAKGWGSI

SEQ ID NO: 21170 - protein, 467 aa, Zea mays
  VARIANT 167: note = Ancestral polymorphism is T, Derived polymorphism is I
MGRPSRGRQRIEIRHIEDGGRLQVTFSKRKSGLQKKASELFLLCGSPVAIVIFSPGKKVFALGTPSVDHVLRRYAPIPGEEEEDGLLPVLQDTDDVSAITDRVEVEGIVRRTEETKARSVMEKARMDAIGKTVRQTAAKAGRKFWWEADSGKLGEAELPEFAKIKMTEPSSSYSLPSKKRQRSPDDNEHSLDRGRICLSLDDNLTFNDTMIALQLMRTQFPKLDKVLAQPFILQSQLYSSVKDRTQVDRDLESFKKDKVLRIFKLSSGQDDHAIMFMDDYLKQVAKREGEGTMVEDVVLDIVVINVAVESTNVKVSFAIKRSGGKDQDGSEVFEWFERYVVPSKLDVSITQLELCSLLSQGGDVTDKHITLLMNAGLLTRQLIDPNIYWFSIPRIGPILKGLSQGRNEILSLLNRRKYKEMPLSSLENTKLRLSPLDTRFLLRDLIGSGHIKTVQTPTGLLARVSRD

SEQ ID NO: 21171 - protein, 487 aa, Zea mays
  VARIANT 77..487: note = Derived polymorphism lacks residues 77 to 487
MDGRGDDNADFFSDFMVLRPDKGGVRSLLHLLCSCKVADNDAVDCPAGTEVAERWRRWAIFVSLAAQMLLLAVKRPLAALGSAVEYWMNLLTDNGGGVVGLVRNAEQQELNSSVCTMKLNAGKVRTPDRRSSNYRSFIGLIDTRIELDRKIAAGDSTYNAALGIMAAKLAYENKLVIKTVVESHWQMTFLEFFNCWNEFSGAYTTQAFMLADRPADAELVVIAFRGTQPFDAEQWCTDVDFSWYEIPGVGKVHGGFMKALGLQKNAGWPAQLTEPTTTRPYAYYAVRERLRAVLAANPRARFVVAGHSLGGALAVLFPTVLALHGEGSLLGRLAGVYTYGQPRVGDAQLGRFMEEHLDRPRRYFRFVYCNDVVPRVPYDDAALLFKHFGLCLYFDSFYRAAAMAEEPNKNFFSPLFLAPKYANAAWELLRGFLIGHVCGAVYAEGWVMRAARAVGLLIPGLPPHSPQDYVNATRLGAASLEPLLRDQ

SEQ ID NO: 21172 - protein, 610 aa, Zea mays
  VARIANT 70: note = Ancestral polymorphism is V, Derived polymorphism is D
MRLPLPLLALVCCALMARQHCAAAGKARHLRWEISNMFWSPDCEEKVVIGINGQFPGPTIRARAGDTVHVQLRNALHTEGVVIHWHGIRQIGTPWADGTAAISQCAINPEETFTYRFVVDKPGTYFYHGHYGMQRAAGLYGSLVVDVAEGEEEPFQYDGELNLLLSDWYHESIHTQMVALSSRPFRWIGEPQQFVKHCSFLKGQFEKTHTCSMQLIYEALHQSLLINGRGQFNCSLAAAHTQGATNTQCAATAANTQCAPVVLPVQPNKTYRLRVASTTSLASLNLAIGNHKLTVVEADGNYVDPFVVDDIDLYSGDSYSVLLTTDQDTSSNYWVSVGVRGRLPKTAPALAVLNYRPNRASDLPALAPPVTPAWDDYGHSKAFTYRIRARAGTPPPPPTAARRIELLNTQNRMDGRIRWSINNVSMVLPATPYLGSLKMGLKSTLAAARPAETFSREYDVTLPPPNPNTTAGDNVYVLAHNTTVDVLLQNANALSRNVSEVHPWHLHGHDFWVLGYGDGAYRGDAADEARLNLRDPPLRNTAVIFPYGWTMLRFVADNPGVWAFHCHIEPHLHMGMGVIFAEAVDLVAKVPNEAVSCGATATALMAGGHL

SEQ ID NO: 21173 - protein, 377 aa, Zea mays
  VARIANT 342: note = Ancestral polymorphism is A, Derived polymorphism is E
MRWGRESGSPRRSSTASTKLAIRREQQGSSTELMGTLCYGGRASTGWAQEQGRLGSRGVGAREGEGNRVMRLQMEPARERHLWEAVWEKRNRRWADWWARCAATANGMRAAAKPPCPVIPRARRGDTAQPGYTQEEFEFYLSDSKPCLLVTNADGNVAAQAAAAKLRLAHAATSLHDAVDPVHLAGLPVPALQNGSHVGGVAGSLSPGAIALAYSLYATSAARPSARSLTPVTSPSSPIAPLPTSTWARSLPVRVPTLRSHMRQRTMVLSNYLHGKGCFRRPSMEIEYGLCAVSLDHEAVKTWIYPTNVEGREYQKYMVEKAMFTNTLIALPTGLGKTFIAAVVMYNYFRWFPEGRSLFLAIQLLPEFVFGHATQKL

SEQ ID NO: 21174 - protein, 261 aa, Zea mays
  VARIANT 35: note = Ancestral polymorphism is E, Derived polymorphism is K
  VARIANT 15: note = Ancestral polymorphism is G, Derived polymorphism is D
MVKTATATAAARHGGAHKRTYKGVRMRSWGSWVSEVRAPGQKTRIWLGSHSTAEAAARAYDAALLCLRGSAAAPDLNFPPRRPLADGLHPLPPAAMSPKAIQRVAAAAAACCAPQSNGIGSACCAAPCAPPSNGIGSACGHAETAPALSGSPPSSDSDVSSPEAGSTASSDGELARYGDGDGDGGVSVDYGSLADIDAFFQSPKCMDDDHYYYAALMDPCGAFFAPAPSVAADDDAAAAAGCWEDGDGIALWSFSFPALDC

SEQ ID NO: 21175 - protein, 201 aa, Zea mays
  VARIANT 130: note = Ancestral polymorphism is G, Derived polymorphism is D
  VARIANT 108: note = Ancestral polymorphism is H, Derived polymorphism is L
  VARIANT 105: note = Ancestral polymorphism is K, Derived polymorphism is M
  VARIANT 77: note = Ancestral polymorphism is G, Derived polymorphism is D
  VARIANT 44: note = Ancestral polymorphism is W, Derived polymorphism is S
  VARIANT 18: note = Ancestral polymorphism is P, Derived polymorphism is S
MLIEWSLFHPWLPLRSNSKDWPKDKIKDENCWSDKEFCRNEENWYFVAKISSEEAALEYAKQTGLDVVTVNPAVVFDPLLQPTLNTSCQFLVYFLKGGSDRMRDKLWHIVDVRDTADALLLVYETPQASGRHICAPHFISICDLLELLKTMYPDDYPFISKDTSSSNVSASHVGRVRRRKHPTEATTDGNRANGQPLLVND

SEQ ID NO: 21176 - protein, 529 aa, Zea mays
  VARIANT 135: note = Ancestral polymorphism is R, Derived polymorphism is G
  VARIANT 131: note = Ancestral polymorphism is W, Derived polymorphism is C
MTPHVLLVLVILLYLVRTLRPWRSRRNSTCCTPSLPPGPVPWPVVGNLPEMMLSDKPAFHWIHHIMKEAGTDIACIKLGGVHVIPISCPKIALEVLSNQDANFASRPLTFASKTFSTGYRDAAMSHCGDHWKKMGRVLASEIVCPSRHRWLHDKRADEADNLTRYVYNLATKAGSSGAVDVRHIARHYCGNVVRRLMFNTRYFGKPQPDSGPGPLEVQHVDAVFTSLGLLYSFCVSDYLPWLLGLDLDGHEKMVKEANERVTRLHDAVIDERWRLWKSGERRELEDFLDVLIMLKDAEAGRPVLSIEEVKALLMDITFASMDNPSNAVEWALAEMVNNPTMLKKAVDEIDSVVGQERLVQEHDIPRLNYTKACIREAFRLHPVAPFNVPHVAVADATVAGYRIPKGSHVILSRTGLGRNPDVWDDPLRFDPERHIPLSPEMEVSLVERDLRFISFSTGRRGCIAAALGTDMTIMLFARLLQGFSWSKMTGVAAIDLSESRHNTFMARPLVLQAKPRLPAHLYPGILLCK

SEQ ID NO: 21177 - protein, 486 aa, Zea mays
  VARIANT 357..486: note = Derived polymorphism lacks residues 357 to 486
  VARIANT 217..486: note = Derived polymorphism lacks residues 217 to 486
  VARIANT 97..486: note = Derived polymorphism lacks residues 97 to 486
  VARIANT 83: note = Ancestral polymorphism is P, Derived polymorphism is L
MGHARPHQQGAGSAASPVSCLTKFILFQKNWACRILDYLLVVVPRRAREGSQTPSFEHGYRVGYKDDNNLTVQTCNANIKITPVNLFQPSDIKWASRWDVYLLSCDSQIHWFSIVNSLMIVLFLSSMVAMIMMRTLYKDIANYNQLDNQDEAQEETGWKLVHGDVFRPPVHSGLLCVYVGTGVQFFGMTLVTMMFALLGFLSPANRGGLMTAMVLLWVFMGVLARYTSSRLYKMFKGTEWKKITLKTAFMFPGIIFSVFFFLNALIWGEKSSSVVPFGTMFVLFLLWFGISVPLVFVGSFLGFKQPAIEDLVKTNKIPKQIPEQTWYLQPIFVILAGGILPFGAVFIELFFILTSIWLNQFYYIFGFLFIVFVILIVTCAEITIVLCYFQLCTEDYHWWWRAYLTAGSSTLYLFVYAIFYFFNKWEITKLVSGIMYFGYMLIISYAFFCADWYLWFLCLLLVREEDICFCQDRLIKELLEKIILCS

SEQ ID NO: 21178 - protein, 498 aa, Zea mays
  VARIANT 151: note = Ancestral polymorphism is P, Derived polymorphism is R
MAWLAVARFFSMGLVKEGIDMEEGTLEIGMEYRTVSGVAGPLVILDKVKGPKYQEIVNIRLGDGTNRRGQVLEVDGEKAVVQVFEGTSGIDNKYTTVQFTGEVLKTPVSLDMLGRIFNGSGKPIDNGPPILPEAYLDISGSSINPSERTYPEEMIQTGISTIDVMNSIARGQKIPLFSAAGLPHNEIAAQICRQAGLVKTLEKGKHAEGGEDDNFAIVFAAMGVNMETAQFFKRDFEENGSMERVTLFLNLANDPTIERIITPRIALTTAEYLAYECGKHVLVILTDMSSYADALREVSAAREEVPGRRGYPGYMYTDLATIYERAGRIEGRTGSITQIPILTMPNDDITHPTPDLTGYITEGQIYIDRQLHNRQIYPPINVLPSLSRLMKSAIGEGMTRRDHSDVSNQLYANYAIGKDVQAMKAVVGEEALSSEDLLYLEFLDKFERKFVTQGAYDTRNIFQSLDLAWTLLRIFPRELLHRIPAKTLDQYYSRDASH

SEQ ID NO: 21179 - protein, 323 aa, Zea mays
  VARIANT 205..323: note = Derived polymorphism lacks residues 205 to 323
MVGPGSVAAAPHDRDPEAAAQSMLSLAKKERSASALLPNKKECEYRNGKWVSNNRRPLYSGFGCKQWLSESWSCKLTQRKDFSYEKFRWLPEACEMLEFEVSQFLRRMQDKIIAYMGDSQGRQMFQSMMCMVTGGKERLDVEDVGADYGFVLAPGAKKSRWLGLPVPEHQHNNYIPLNPGKLRANRWEMYLGGAPNNDRNTAVIWKAKNFTVHSVVRWVDAQLPRRPKMKAFYRSISPRHFFNGDWDTRGSCDNTSQGGSGVHLDRSEDADAKGAVRGTRVRLLDLTALSRLRDEGHISRYNVKATPGVLDCLHWCLSCMPDT

SEQ ID NO: 21180 - protein, 212 aa, Zea mays
  VARIANT 184: note = Ancestral polymorphism is G, Derived polymorphism is R
  VARIANT 75: note = Ancestral polymorphism is V, Derived polymorphism is I
MATWFGCSRKAARGQHVKLVFPGGHVELLDRPTLAADVMARHPRFCVARPDVFREPAGAVAAPDAVLELGHKYFIVPCSTVRRLLKYSAPATPSLSPSSSRGGSSGTVALKRHLASERGYKVGGRRKWFRCLVGGSGGAQAQSQSQRPNREGVGHSGKDKMVRKLDMKETNKENGKAPSGGSPGRRRRRRGASPGNSASYSWQPSLHSITEE

SEQ ID NO: 21181 - protein, 318 aa, Zea mays
  VARIANT 34: note = Ancestral polymorphism is G, Derived polymorphism is R
  VARIANT 53..318: note = Derived polymorphism lacks residues 53 to 318
  VARIANT 166..318: note = Derived polymorphism lacks residues 166 to 318
  VARIANT 168: note = Ancestral polymorphism is S, Derived polymorphism is C
  VARIANT 253: note = Ancestral polymorphism is A, Derived polymorphism is V
  VARIANT 262: note = Ancestral polymorphism is R, Derived polymorphism is W
  VARIANT 263: note = Ancestral polymorphism is S, Derived polymorphism is Y
MSAAEPEAHAASDGFDRRRRELQAFDDTKAGVKGLVDAGVTAITAIFRHRPAGVPGGDDLVPAAVVNHGVPRELMAAALAGVRRFNEQQAEAKRRFYTRDTARKVRFTSNYDLFQSAAASWRDTLFCELAPDPPRPEELPEAVRGAMLEYGDAATELALRVLELLSESLGLPSDHLREMGCARSLNVASHYYPPCPEPHLTLGTSRHADATFLTVLLQDAMGGLQLVSNDRFRSVEHRVLANKSKDTPRVSVACFFNADVKRSTRLYGPIITDGGGSSSPPLYKSVTAREFVGYSYSKGLDGRPLEHFRLEGTTAACP

SEQ ID NO: 21182 - protein, 566 aa, Zea mays
  VARIANT 454: note = Ancestral polymorphism is Y, Derived polymorphism is N
  VARIANT 385: note = Ancestral polymorphism is A, Derived polymorphism is V
  VARIANT 374: note = Ancestral polymorphism is A, Derived polymorphism is V
  VARIANT 334..566: note = Derived polymorphism lacks residues 334 to 566
  VARIANT 323: note = Ancestral polymorphism is R, Derived polymorphism is S
  VARIANT 300: note = Ancestral polymorphism is D, Derived polymorphism is Y
  VARIANT 258..566: note = Derived polymorphism lacks residues 258 to 566
  VARIANT 231..566: note = Derived polymorphism lacks residues 231 to 566
  VARIANT 136..566: note = Derived polymorphism lacks residues 136 to 566
  VARIANT 47: note = Ancestral polymorphism is L, Derived polymorphism is S
MQSLLAGIPAGGAAAAAAVGGLVAAAALAERADQKNRLNLPPAVPGLPIIGNLHQLKEKKPHQTFARWSEEYGPIYSIRTGASSVVVVNSAEVAKEFALLVISLPAVHFLCFLKVEMYQGLKRPPFCFEKMPYYCRIPLNAMVAKYSSINTRKLPKALSVLTRDKKIVAMSDQGELYKMVKRYIMVSMLGAAAQKQFRDTRNTMIDNMLSTFHALVADDPKAPLNFRDVFQNELFGLSMTQANDFLHILRFETGLQIQALSEDVSSVYVEEFGKALSREEIYQTAVADMMMCAIEVDWRDFFPYLGWIPNRSFETRVLTTEARRTALMQALINQQKERIARGESRMSYVDFLLAENTLTDEQLLMLVWEAVIEAADTTLVTTEWAMYEIAKHPEKQEYLYQEIRKVCGNKTVTEDHLPELPYLNAVFHETLRRHSPVPLVPPRLVHESTNLAGYEVPAGTQMIINLYGCNMNKSDWDAPEEWRPERFLDGSFEVADMYKTMAFGGGRRACAGSIQAVNIACTAIARFVQEFAWTLKEGDEDKDDTIQLTTNRLYPLHVYLTPRGRK

SEQ ID NO: 21183 - protein, 156 aa, Zea mays
  VARIANT 9: note = Ancestral polymorphism is C, Derived polymorphism is Y
  VARIANT 13: note = Ancestral polymorphism is C, Derived polymorphism is Y
  VARIANT 18: note = Ancestral polymorphism is V, Derived polymorphism is A
  VARIANT 29: note = Ancestral polymorphism is I, Derived polymorphism is M
  VARIANT 34: note = Ancestral polymorphism is Q, Derived polymorphism is R
  VARIANT 67..156: note = Derived polymorphism lacks residues 67 to 156
  VARIANT 84: note = Ancestral polymorphism is Y, Derived polymorphism is N
  VARIANT 85: note = Ancestral polymorphism is D, Derived polymorphism is G
  VARIANT 97: note = Ancestral polymorphism is A, Derived polymorphism is T
MACMRRAPCVPACGWEPVVYFPQGHSEQIINLVRRLLSHDNQVQEVSRIPNGSNPGNCISLLREQLQKVLDAGISIKVWSISAYGIGFLLLSGHCIAIALVDKLKLKLRYWHNIIITIISKEVYHAGVIMMYNSTMRSQTTWHCRIIDDQHAGSVV

SEQ ID NO: 21184 - protein, 68 aa, Zea mays
  VARIANT 65..68: note = Derived polymorphism lacks residues 65 to 68
  VARIANT 33: note = Ancestral polymorphism is A, Derived polymorphism is V
  VARIANT 32..68: note = Derived polymorphism lacks residues 32 to 68
  VARIANT 26: note = Ancestral polymorphism is S, Derived polymorphism is F
  VARIANT 23..68: note = Derived polymorphism lacks residues 23 to 68
  VARIANT 19..68: note = Derived polymorphism lacks residues 19 to 68
  VARIANT 12: note = Ancestral polymorphism is G, Derived polymorphism is R
  VARIANT 11: note = Ancestral polymorphism is A, Derived polymorphism is V
MKVFIEFTDVAGLYFALTQLTHRNISQNHKFQAVGHDICLGFYSVPILSCTALSFPWHGFGMNIWKHT

SEQ ID NO: 21185 - protein, 479 aa, Zea mays
  VARIANT 12..479: note = Derived polymorphism lacks residues 12 to 479
  VARIANT 116: note = Ancestral polymorphism is C, Derived polymorphism is Y
  VARIANT 178: note = Ancestral polymorphism is T, Derived polymorphism is I
  VARIANT 229: note = Ancestral polymorphism is D, Derived polymorphism is Y
  VARIANT 238: note = Ancestral polymorphism is D, Derived polymorphism is Y
  VARIANT 300: note = Ancestral polymorphism is S, Derived polymorphism is I
  VARIANT 348: note = Ancestral polymorphism is A, Derived polymorphism is S
  VARIANT 352: note = Ancestral polymorphism is G, Derived polymorphism is E
  VARIANT 387: note = Ancestral polymorphism is F, Derived polymorphism is S
MAEGADVGMQHQTTQNVTTNEDDGGVLFAEDDDEAVFDDDDEEEGYLFVGQDDESGEDIKIYETQDAFTVTSGIPDSYDKVFNNMPEETHLLNTVADCNCCKAKKFQNEPPEFYCCSGQVDLAPLETPSQLRRLWECADVDARHFRDNIRFFNDHFLFTSLYCCLDSTTTNMDCGVYTFRAHGTMYHNIRSFGRQAGSEHKHLELYFYDDDPSLEHRYCKCRQDQLEKDKSVIKQLVDILRGNPYSEHLRSIFNPILHGKRIFQQFAVDTYIKIESSRLDFIRKNQSRLRADLYKGLVDSLHEEEMKKRLTKQLILGKIRAYVYVVEFQKRDLRTLDGDTLPSFREAAQRRGLLEADDTIDECLNEAAFYQIPSALQRLFATILVYFNGEDINTFHLPAIIDRYDDSHGTDREIYEEQIIEPTAEDVALKETLNEEQRSAYDKILSVVDTDKGGVFFMDGPGGTGKTYLYKALLASLRS

SEQ ID NO: 21186 - protein, 255 aa, Zea mays
  VARIANT 15: note = Ancestral polymorphism is R, Derived polymorphism is C
  VARIANT 36: note = Ancestral polymorphism is C, Derived polymorphism is Y
  VARIANT 61: note = Ancestral polymorphism is M, Derived polymorphism is K
  VARIANT 76..255: note = Derived polymorphism lacks residues 76 to 255
  VARIANT 100: note = Ancestral polymorphism is S, Derived polymorphism is R
  VARIANT 115: note = Ancestral polymorphism is E, Derived polymorphism is K
  VARIANT 121: note = Ancestral polymorphism is T, Derived polymorphism is I
  VARIANT 129: note = Ancestral polymorphism is V, Derived polymorphism is I
  VARIANT 139: note = Ancestral polymorphism is M, Derived polymorphism is V
  VARIANT 159: note = Ancestral polymorphism is G, Derived polymorphism is R
  VARIANT 175: note = Ancestral polymorphism is E, Derived polymorphism is D
  VARIANT 185..255: note = Derived polymorphism lacks residues 185 to 255
  VARIANT 190: note = Ancestral polymorphism is L, Derived polymorphism is P
  VARIANT 202..255: note = Derived polymorphism lacks residues 202 to 255
  VARIANT 208: note = Ancestral polymorphism is G, Derived polymorphism is V
  VARIANT 209: note = Ancestral polymorphism is V, Derived polymorphism is A
MRAQSDPWFAEYLLRVGGGTEEANNDGDVHLPDEICVPYIGDDRDLDRLIDDIYPNLNENMSNTRYITSRAILTTRNDWVDTINMRMIDRFQGEQMMYHSFDTTVDDPNNYYPSEFLNTLIPNGLPPHVLKLKVECPIMLLRNIDLANRLCNYTRLNAGMQIFLPRIPLCPSDDEMFPFHFKRKQFPVRLSFAMTINKSKDQTIPNVVVYLPEPVFSHGQLYVALSRGTARSNVKILAIPFTDEKKNKGYKRTQQ

SEQ ID NO: 21187 - protein, 160 aa, Zea mays
  VARIANT 38: note = Ancestral polymorphism is S, Derived polymorphism is L
MEIQVLDSLGTSSDRNDLTDSDDMTHFRKKLAAILLSSDMNKRKGCLLYKYEKEVDTRSPSDVQILDSPTNPKKRKLLCAPDDSEVLMEDDDGPITQADLERWFVHDWDKGTPIKVSADECTNDFLMSGLSTKDMPVTKADLIDVLCDYIMAIQDDMTLQ

SEQ ID NO: 21188 - protein, 469 aa, Zea mays
  VARIANT 351: note = Ancestral polymorphism is N, Derived polymorphism is I
MEHRHLFCVDAWISNGSVARATAVFDEYRRALCGIVSGLALHCNSISGSRHEDGGVHGLRQRRDRGRVVVEHLGASGGDPLQDSLLEELMQAAPTVPSSSSSSMPSLSIGSPEYSSLIRSMATSSAAAAAAATGTTEPSSQQRQLHRAVPLPGLAAPVYGPRGQAPFLDPDSEQAAMTQAILAVISSSAPPPLASIAVPPASSPWLVRHRAQRSSPRRWRGAFRAYNAALSPRARPRPGVPGQRMIKTSIALMVSLQMAMRHRELAEARQQHEDAVAATQPPTTTQQQHTSSQLHHMFSERRRRERLNESFQTLRALLPPGTKKDKATVLANTTEYMKKLIADVSELEERNRRLEAQLGLPGETQQTPSDDDPSERVAVDVTTGASTSSSTSCRPRQVSIRVTARAECDLSEVVVAMLAQIKEMGRFTVVTVDARQRSGAHAQVAIILQATTSMGLPLTAAAPWRGNEH

SEQ ID NO: 21189 - protein, 381 aa, Zea mays
  VARIANT 222..381: note = Derived polymorphism lacks residues 222 to 381
MASSSSSPAPALAGEALRQKRILSSKLYLEVPSSKAPVVYSPAYDISFLGLEKLHPFESAKWGRICRYLTREGYLDKKQMVEPLEACKEDLLVVHTEAYLNSLKCSFRVSSIVEVPPVSLVPNWIVHRKLLHPFRKQVGGSILSAKLAFERGWAINVGGGFHHCSADEGGGFCAYADISLCIQFAFVRLNISSVLIIDLDAHQGNGHEKDFANDGTYFNFLWILVLYICQFDTSLSLTGRVYILDMYNAGIYPFDFTAKQYIDQKVELVSGSKTDEYLEQLDKALEICNSRFEPQLIVYNAGTDILDGDPLGRLKVSPEGVVTRDEKVFRFAKDRNIPLLMLTSGEILLTRGYMKSSARVIADSIINLSNKNLIGLGSQLG

SEQ ID NO: 21190 - protein, 351 aa, Zea mays
  VARIANT 34..351: note = Derived polymorphism lacks residues 34 to 351
  VARIANT 49..351: note = Derived polymorphism lacks residues 49 to 351
  VARIANT 113: note = Ancestral polymorphism is T, Derived polymorphism is I
  VARIANT 271..351: note = Derived polymorphism lacks residues 271 to 351
MDMYYRSPSVTQDICDIDLQCSKMSTQPRIDIMLHGSAKERLGKTWAKWFHGNDIPGRKADCPYFVAVVNYLSNLGKEWLHAMMKEKIGGELVRWNATRDFMKKVNEIIKKKTQYLLSDTLMLAGATLDPKALYTSKLATHHSAILAVTLAIKKLAHSPIETSIAIEQFTRTFSKKEKLFGSLEARSSALHVDANPEWFSNSRSKSRPILDEYDDDDYDWDAPGSFLIEELQMGKLDVTAFKRNLGLGKNSRCKKPLSQLDEEEEFEDDYESDSPHGSPLYDEPWDICSDDEGNNSVGVDWLEDKSGGDVAKNKSYCTEGHGCGREMANNMITFVGDSYFGKHELIFKCFC

SEQ ID NO: 21191 - protein, 345 aa, Zea mays
  VARIANT 29: note = Ancestral polymorphism is L, Derived polymorphism is H
  VARIANT 71: note = Ancestral polymorphism is S, Derived polymorphism is F
  VARIANT 104: note = Ancestral polymorphism is N, Derived polymorphism is D
  VARIANT 126: note = Ancestral polymorphism is P, Derived polymorphism is S
  VARIANT 131..345: note = Derived polymorphism lacks residues 131 to 345
  VARIANT 132: note = Ancestral polymorphism is S, Derived polymorphism is P
  VARIANT 133: note = Ancestral polymorphism is R, Derived polymorphism is C
  VARIANT 158: note = Ancestral polymorphism is M, Derived polymorphism is T
  VARIANT 172: note = Ancestral polymorphism is A, Derived polymorphism is V
  VARIANT 179: note = Ancestral polymorphism is H, Derived polymorphism is R
  VARIANT 190: note = Ancestral polymorphism is A, Derived polymorphism is V
  VARIANT 207: note = Ancestral polymorphism is A, Derived polymorphism is V
  VARIANT 288: note = Ancestral polymorphism is P, Derived polymorphism is L
  VARIANT 329: note = Ancestral polymorphism is S, Derived polymorphism is F
MAVPRPRIRALRRGTLLLFLLVPLIYSGLRALNKIGLSSEENYSGEHVSFVTVFTTYNSVSAGDGNVPPDSVTVGNSSYSKIERSMTILNTFISFIKVSMPRSDVIILTDPGSKFSVNQGSATLLPIEGNYSRGNLMLQRIKTYIAFLEQKLVEFDRTERLNHFVLTDSDIAVVDDLGHIFEKYPHFHLAVTFRNNKGQPLNSGFVAVRGTRDGITKAAEFLKQVLKAYSLRYIKAARMLGDQLALAWVVKSHLPSALGKFSKHEAFTGEVNGTSVLFLPCAVYNWTPPEGAGQFHGIPLDVKVVHFKGSRKRLMLEAWNFYNSTSKMSDMLCLILRSGRTKYDF

SEQ ID NO: 21192 - protein, 417 aa, Zea mays
  VARIANT 108: note = Ancestral polymorphism is G, Derived polymorphism is S
  VARIANT 102: note = Ancestral polymorphism is A, Derived polymorphism is V
  VARIANT 97: note = Ancestral polymorphism is W, Derived polymorphism is R
  VARIANT 29: note = Ancestral polymorphism is E, Derived polymorphism is D
MALVLHSGAGNKNAFKALIAAEYSGVKVELTKDFEMGVSNKTPEFLKMNPLGKVPVLETPDGPVFESNAIARYVARLKDDNPLFGSSRIEQAHVEQWMDFAATEVDPGVGWYLYPRLGYIPYAHTTEETAIASLKRSLGALNTHLALNTYLVGHSVTLADIVLTCNLYHGIARILTKSFTSDFPHVERYFWTMVNQPNFKKVIGEVKQAESVPPVLKKGVPPKESKAKDVKKETPKEAPKPKVVEVPAEEEAPKPKPKNPLDLLPPSKMVLDDWKRLYSNTKTNFREVAIKGFWDMYDPEGYSLWFCDYKYNDENTVSFVTLNKVGGFLQRMDLCRKYAFGKMLVVGSEPPFKLKGLWLFRGQEVPKFVMDEVYDMELYEWTKVDISDEAQKERVNAMIEDQEPFEGEALLDAKCFK

SEQ ID NO: 21193 - protein, 462 aa, Zea mays
  VARIANT 27..462: note = Derived polymorphism lacks residues 27 to 462
MQDESWSAITGSCTIVRDMKDMLVHSYYEVRLHAPPDGKRKMAADKKRNLGAGLYHLSPDDLNKVLEIVAQDNRSFQPKAKEVDLNMDAQDLFKARFGQTLESQKLNIKKIETQLCRRSTDIRSASLHGRASSAAADVWARPWPAPRVSRLATATSIDVPAEDPVGSSLSSGWIRIFNERSTDIRSASLHGRASSAAADVWARPWPAPRISRLATATSIDVPVEDPAGSSLSSRWIRIFNDRSTDIRSASLHGRASSAATDVWARPWPAPRVSRLATATSIEVPVEDPASSSLSSAADVWARPWPDPRVSQLATATSIDVPVEDPAGSSLSSGRRIPDPPCRRSLPPPRWCPSSDVELLDTAVPELLRAAATDVLHGARAEGLRADAPPPAKLLLTTGAEGDSALLLLLPAKLLRAAAAELVRVVAVECLRVTASPGTRVATAAGSTSRSEHMEPDWMAAEI

SEQ ID NO: 21194 - protein, 194 aa, Zea mays
  VARIANT 86: note = Ancestral polymorphism is R, Derived polymorphism is Q
  VARIANT 96: note = Ancestral polymorphism is L, Derived polymorphism is P
  VARIANT 101: note = Ancestral polymorphism is G, Derived polymorphism is C
MGSAISDRHIRDLAHPASHDGEPQSALDRRSQIHHRLTTRAAWSGGVHRRYYKTSGYGRCYGNSTGPPCAGWVEMMVPVFSRAAWRCVWHMIQNDLIYAWCMDYMLGYCAQGDRSRNVGVVDSQYVLHRGIPTLDDDGKATTTAATSALGTADRLAVRQQSYTELQLFNRRWKKAVAEDWCWTDPYPNPGTTTG

SEQ ID NO: 21195 - protein, 172 aa, Zea mays
  VARIANT 35: note = Ancestral polymorphism is H, Derived polymorphism is Y
MIGSNSSVHAGNHGDGEPPVSQAELHHMTRGRRLHHRDPEEFYREESGDENSGFGHGFELFSNDYRGFGDVRHANFDNPRGRRHAHGHRVRFEDVVFDDHDREDGSDENPFANDGMFGLRHHHRHADFEDRDPYHGRCHINDPDDIARVKLDIPKFTGKESAEFTIFQINTE

SEQ ID NO: 21196 - protein, 443 aa, Zea mays
  VARIANT 50: note = Ancestral polymorphism is R, Derived polymorphism is W
MKRLVALLVLIALPVRAVPVSGAGVVALLTHADAGRGLASAELVRRMAHRTRARRRLLSSHRRPARARVRAGLGAGGGIATNEYLVRLAVGTPRRPVALTLDTGSDLVWTQCAPCRDCFDQDLPVLDPAASSTYAALPCGAARCRALPFTSCGVRTLGNHRSCIYAYHYGDKSLTVGEIATDRFTFGDSGGSGESLHTRRLTFGCGHLNKGVFQSNETGIAGFGRGRWSLPSQLNVTSFSYCFTSMFESKSSLVTLGGSPAALYSHAHSGEVRTTPILKNPSQPSLYFLSLKGISVGKTRLPVPETKFRSTIIDSGASITTLPEEVYEAVKAEFAAQVGLPPSGVEGSALDLCFALPVTALWRRPAVPSLTLHLEGADWELPRSNYVFEDLGARVMCIVLDAAPGEQTVIGNFQQQNTHVVYDLENDRLSFAPARCDRLVASL

SEQ ID NO: 21197 - protein, 568 aa, Zea mays
  VARIANT 114..568: note = Derived polymorphism lacks residues 114 to 568
  VARIANT 17: note = Ancestral polymorphism is C, Derived polymorphism is W
MQLADSSHLVAPVPTLCSNMTARAAYLASFLIVTSFLPTSSSHSHVPAVTDALDIVSKISTEHDATIKASMDFGHIVRAIPSGVFHPTSPSDIAALIRLSLSQPKPFAVAPRGRGHSARGQALAVGGVVVDMRSLHDHDHDHRAGHGRYRMNNAVPGAWVDVGGEQLWIDVLHATLEHDLAPRVWTDYLHITVGGTLSNGGIGGQAFRHGPQISNVHELDVVTGTGEMVSCSPGKNSDLFYAALGGLGQFGVITRARIALEPAPRRVLWVRLAYSDVRSFTSDQELLISKRPAGGCGSGFDYVEGQVQLNRTLTEGRRSSSFFSAPELDQLARLAVATGSAAIYYIEGAMYYDDDTTTASSVNQKLETLLEELSFVPGLAFVRDVSYVDFLDRVGRDEQKLRSAGVWDVPHPWLNIFVPRSRILDFDAGVFKGILKGTRPVGLILMYPMNKDRWDDRMTTATPDEDVFYAVGLLRSAVAAADLEQLERENAAVLEFCHREGIGYRQYLPSHASLDGWRRHFGEKWSRFAALKRKYDPRAILTPGQGIFFSAGHDLTDQQTGSDSRNVL

SEQ ID NO: 21198 - protein, 722 aa, Zea mays
  VARIANT 7: note = Ancestral polymorphism is L, Derived polymorphism is R
MSGGAPLLALLLLAAAAMIAPSPANAAVSYDHRAVVINGQRRILISGSIHYPRSTPEMWPGLLQKAKDGGLDVVQTYVFWNGHEPVRGQYYFGDRYDLVRFVKLAKQAGLYVHLRIGPYVCAEWNFGGFPVWLKYVPGISFRTDNGPFKAAMQAFVEKIVSMMKSEGLFEWQGGPIILAQVENEYGPMESVMGAGAKPYANWAAKMAVATGAGVPWVMCKQDDAPDPVINTCNGFYCDYFSPNSNSKPTMWTEAWTGWFTAFGGAVPHRPVEDMAFAVARFIQKGGSFVNYYMYHGGTNFDRTSGGPFIATSYDYDAPIDEYGLLRQPKWGHLRDLHKAIKQAEPALVSGDPTIQSLGNYEKAYVFKSSGGACAAFLSNYHTSAAARVVFNGRRYDLPAWSISVLPDCKAAVFNTATVSEPSAPARMSPAGGFSWQSYSEATNSLDGRAFTKDGLVEQLSMTWDKSDYLWYTTYVNINSNEQFLKSGQWPQLTIYSAGHSLQVFVNGQSYGAVYGGYDSPKLTYSGYVKMWQGSNKISILSAAVGLPNQGTHYETWNVGVLGPVTLSGLNEGKRDLSDQKWTYQIGLHGESLGVQSVAGSSSVEWGSAAGKQPLTWHKAYFSAPSGDAPVALDMGSMGKGQAWVNGRHIGRYWSYKASSSGCGGCSYAGTYSETKCQTGCGDVSQRYYHVPRSWLNPSGNLLVMLEEFGGDLSGVKLVTRTA

SEQ ID NO: 21199 - protein, 487 aa, Zea mays
  VARIANT 149: note = Ancestral polymorphism is A, Derived polymorphism is G
  VARIANT 172: note = Ancestral polymorphism is G, Derived polymorphism is R
MEQWLALFRHLLTSPAANAAAFSSSPSSGDCPSAPPSAAALLRLLLSPAPTLPASDPTAAILFQTLPPFLQSQALSFLVSSAGLLDPHLLRTLAARVLSAPHGLYGLWVLRGARHLIDGLPEEEGVPGVASEEFIDGFHDPPTWLQEAGARAHPVLPWLPVDCRSLMGSGCGTRAGRGGEYGSDGIGLENLVLVQNEDVEMQEAGRVLPPQAPPLEDSIMQRVVALQKEIVTVESVLAARRVAKDLQDLCVESRNAAGVLSLVQPWEADDDTLRVLLSNLVLEEDGVDGKGPALVLCSVFLPQLLELQRPASSVLLSTALGLCKRHPAAALEAVLFPLVLRKGGLNVPQCDVLTRIIKECMHPLQVTAFCHRLLSGKEQERKPICMPQHMENIGTHLVWTESLFALFYNILSQDIYLTPSTVNELISVIDDRASEFPRSLKFGNFLLCFLSKCWHECKHQRVLLERAAKRTNTFLTKAILAKLRPAS

SEQ ID NO: 21200 - protein, 357 aa, Zea mays
  VARIANT 39: note = Ancestral polymorphism is L, Derived polymorphism is Q
  VARIANT 49: note = Ancestral polymorphism is L, Derived polymorphism is R
  VARIANT 197: note = Ancestral polymorphism is R, Derived polymorphism is C
  VARIANT 274..357: note = Derived polymorphism lacks residues 274 to 357
MVAASVAERAYEAATRSALVALERNLIPDAVTRRLTRLLLAQRLRQGYLPSAPLQLQQLLQFVHSLEEMPIAIETDKAKAQHYELPTTFFKLVLGKNLKYSSCYFPGDSSTLEDAEVAMMDLYCERSKLQDGQSILDVGCGWGSLSLYIAKKYRNCSVTGICNSTTQKAFIEEQCRDNELSNIEIIVADISKFEMERSFDRIVSIEMFEHMKNYKSLLKKISRWMKEDGLLFVHLFCHKAFPYHFEDKNDDDWITRYFFTGGTMPSANLLLYFQEDVSVVDHWLVSGTHYARTSEEWLKRMDKSITSIRLIFEETYGKESTTKWIAYWRTFFISVAELFGYNNGDEWMVAHYLFRKK

SEQ ID NO: 21201 - protein, 94 aa, Zea mays
  VARIANT 29: note = Ancestral polymorphism is G, Derived polymorphism is D
  VARIANT 37: note = Ancestral polymorphism is P, Derived polymorphism is S
  VARIANT 39: note = Ancestral polymorphism is P, Derived polymorphism is L
  VARIANT 40: note = Ancestral polymorphism is A, Derived polymorphism is T
  VARIANT 68: note = Ancestral polymorphism is H, Derived polymorphism is L
  VARIANT 71: note = Ancestral polymorphism is A, Derived polymorphism is V
  VARIANT 73..94: note = Derived polymorphism lacks residues 73 to 94
  VARIANT 76: note = Ancestral polymorphism is P, Derived polymorphism is R
  VARIANT 92: note = Ancestral polymorphism is G, Derived polymorphism is S
MGAVQDQQQIELPLSPEDVPFAQVYRFVGDMFDADAPVPAEAHLQKLKEMDDITAKTVLLVLRNLENHLSVPQFERVRRLLSTYDPTRAMSGQL

SEQ ID NO: 21202 - protein, 306 aa, Zea mays
  VARIANT 43..306: note = Derived polymorphism lacks residues 43 to 306
  VARIANT 61: note = Ancestral polymorphism is D, Derived polymorphism is G
  VARIANT 72: note = Ancestral polymorphism is A, Derived polymorphism is T
  VARIANT 80: note = Ancestral polymorphism is M, Derived polymorphism is R
MPSHADLDRQISQLRDCKFLPEAEVKTLCEQAKAILMEEWNVQPVRCPVTVCGDIHGQFYDLIELFRIGGDAPDTNYLFMGDYVDRGYYSVETVSLLVALKVRYRDRITILRGNHESRQITQVYGFYDECLRKYGNANVWKYFTDLFDYLPLTALIENQIFCLHGGLSPSLDTLDNVRSLDRIQEVPHEGPMCDLLWSDPDDRCGWGISPRGAGYTFGQDIAQQFNHTNGLSLISRAHQLVMEGFNWCQDKNVVTVFSAPNYCYRCGNMAAILEIGENMDQNFLQFDPAPRQIEPDMTRKTPDYFL

SEQ ID NO: 21203 - protein, 819 aa, Zea mays
  VARIANT 15: note = Ancestral polymorphism is T, Derived polymorphism is A
  VARIANT 49: note = Ancestral polymorphism is D, Derived polymorphism is G
  VARIANT 58: note = Ancestral polymorphism is S, Derived polymorphism is R
MNESSAAASSYLLLTLIIHLLPFVSAHDFLSAGSSLSVEHSSDVLHSQDGTFTCGFYRISPNASTFSIWFSGSSERTVVWSANPLHPVYTWGSKVELDADGSMVLKDYNGQIVWTNNASVSDAGHVQARLLGTGNLAVEGRGGAILWQSFDSPTDTLLPTQRITASTKLVSTNRLLVPGHYSFRFDDQYLLSLFDDEKNISFIYWPNPRMTIWAKGRVQFNSTMSGALDTLGHFLASDNATFTAADWGPGIMRRLTLDYDGNLRLYSLNVADRTWSVTWMAFPQLCNVHGLCGENGICVYTPVPACACAPGFEVIDPSERSKGCRPKTNISCDVEKVDFAKLPHTDFLGYDMTAHHSVSLDFCKKECLHDCNCKGFAYWEGIGDCYPKSVLVGGVTLQNFASTGTMYIKIPNGLQVLDASIPQSQPFGPKYSPDCGTTNRYFIADFLDKLKRDHSGSKYLYFYGFLSAIFLAEVVFVGLGWFILRREYRELRGVWPAEPGYEMIANHFRRYAYRELVTATRKFKDELGRGASGIVYKGVLEDKGAVAVKKLAEINQSEEEFRHELSVISMINHMNLVRVWGYCSDGPHRILVSECFENGSLDKILFGSKGSEILLGWKQRFDIALGVARGLAYLHHECSEWVIHCDVKPENILLDENLVPKIADFGLAKLLNRGRSNLNVSKIQGTRGYLAPEWVSSLPITAKVDVYSFGVVLLELLIGARVSNMGNDEDVEAEMVLGRVSRLVKEKLQSDDTEPSWIADFIDSRLNGDFNNLQARIMMRLSISCLEEDRDRRPTMENAVQILVLTEDVSGANVMVRAT

SEQ ID NO: 21204 - protein, 127 aa, Zea mays
  VARIANT 24..127: note = Derived polymorphism lacks residues 24 to 127
  VARIANT 43: note = Ancestral polymorphism is S, Derived polymorphism is L
  VARIANT 71: note = Ancestral polymorphism is L, Derived polymorphism is R
  VARIANT 92: note = Ancestral polymorphism is G, Derived polymorphism is A
MGCFHSTAKRQHPSYEDPVHLASQTAFSVSEDEALFELSISGSVIDDGLINKVDNRDSLVPKVTPEEAAKLCDQNFGIGADGVIFVMPGVNGADYTMRIFNSDGSEPKVRVSPPFHHYTESYSMVVN

SEQ ID NO: 21205 - protein, 172 aa, Zea mays
  VARIANT 135..172: note = Derived polymorphism lacks residues 135 to 172
  VARIANT 121..172: note = Derived polymorphism lacks residues 121 to 172
  VARIANT 116..172: note = Derived polymorphism lacks residues 116 to 172
  VARIANT 112: note = Ancestral polymorphism is T, Derived polymorphism is R
  VARIANT 82: note = Ancestral polymorphism is R, Derived polymorphism is Q
  VARIANT 72..172: note = Derived polymorphism lacks residues 72 to 172
MAAALLVAALAAFCGTDSLRTGFESHLVDLPGVVKNEGWERLYGRLMPSLVGTAASQVGCLTVYYYFYQIFQNRAEARALERSRRGLGDGSVGMLQSLTVAALSGCVNALLTNPIWVVVTRMQTHKKANKQQILQGLTCALDEPLEAATAENAPYKTDNEERVSDHCEERGG

SEQ ID NO: 21206 - protein, 429 aa, Zea mays
  VARIANT 319: note = Ancestral polymorphism is R, Derived polymorphism is W
  VARIANT 285: note = Ancestral polymorphism is I, Derived polymorphism is T
  VARIANT 238: note = Ancestral polymorphism is E, Derived polymorphism is G
  VARIANT 232: note = Ancestral polymorphism is T, Derived polymorphism is M
  VARIANT 230: note = Ancestral polymorphism is T, Derived polymorphism is M
  VARIANT 125..429: note = Derived polymorphism lacks residues 125 to 429
MDGYIYQSLFLSVLAVVLLQLVKMALKPRPRLPPGSWKLPVIGSMHHLVNVLPHRALRDLADVHGPLMMLQLGQTPLVVASSKETARAVLRTHDTNFATRPKLLAGEIVGYEWVDILFAPSGDYWRKLSQLCAAEILSPKRVLSFRHIREEEVMLRVEEIRSAGPATPVNLSVMFHSITNSVVSRAALKEIHKTVDTILEEIIEERKCFGFQLTNSIIKAIILDMFAGGTGTSGSAMEWGMSELMRNPPVMKKMQALIREAFRGKTAVTEGDLQASNLQYLKLVIKEALRLHPPAPLLVPRESIEECELDGYTIPAKSRVIINAWAIGRDPKYWDDAGEFKPEWFEDGSQDFTGSSYEFLPFGSSRRMCPSFNYGLASMELVFVGLLYHFDWSLPEGVKDIDMGEAPGLGVRRRTPLMLCASPFVPVPA

SEQ ID NO: 21207 - protein, 309 aa, Zea mays
  VARIANT 112: note = Ancestral polymorphism is R, Derived polymorphism is C
  VARIANT 97: note = Ancestral polymorphism is L, Derived polymorphism is Q
  VARIANT 96: note = Ancestral polymorphism is G, Derived polymorphism is A
  VARIANT 92: note = Ancestral polymorphism is C, Derived polymorphism is Y
  VARIANT 76: note = Ancestral polymorphism is C, Derived polymorphism is Y
  VARIANT 59: note = Ancestral polymorphism is D, Derived polymorphism is G
  VARIANT 53: note = Ancestral polymorphism is R, Derived polymorphism is C
  VARIANT 42: note = Ancestral polymorphism is L, Derived polymorphism is Q
MGKNQAYKAVQRARLGSSYGTPGAADAPEDSMVKYPENFFLLRGNHECASVNRIYGFYDECKRRFSVKLWKTFTDCFNCLLVSALIDEKILCMHGGLSLELNKLEQILNLNRPTDMSDTGLLCDLLWSHPSNEATGWAINDRGVSFTFGPDKVSEFLEKHDLDLICRAHQVVVFLKMGPSYGYRGRVMLAFEDNGSSKIGVRFDKQIPDGCYISTAESLRPDFSAGEEVERLAMTELIEDEALLTDWKQQLDRGVETLKAKSNIGSIRTREVGTTMVVVAAQTKAIAGNFYLLYYLSILYRLDICYFAF

SEQ ID NO: 21208 - protein, 225 aa, Zea mays
  VARIANT 143..225: note = Derived polymorphism lacks residues 143 to 225
  VARIANT 124..225: note = Derived polymorphism lacks residues 124 to 225
  VARIANT 64..225: note = Derived polymorphism lacks residues 64 to 225
  VARIANT 42: note = Ancestral polymorphism is K, Derived polymorphism is M
  VARIANT 41: note = Ancestral polymorphism is E, Derived polymorphism is K
MELLPPVPDPWPQVVEQGFTALVAMVQAWESSAPDENKTPKKRFWQSGQSAIAQTISLLLQKAWLFQADNMEGSALPPLSCVNDASVLLEFVMSSVTCMEETESLKVFELVATWANAVANWDSWEMEDQGVFNTIKEAVNFHQRFDLDGLFLKTHFVRCHSTRNGTIKIGLETNKIMDFIKFDVGNVVMMTGGRNTRRVGVIKNREKHKGNFETIHVLLRAFCYV

SEQ ID NO: 21209 - protein, 531 aa, Zea mays
  VARIANT 63..531: note = Derived polymorphism lacks residues 63 to 531
MDASAGGGGNSLPTTGADGSKRRVCYFYDAEVGNYYYGQGHPMKPHRIRMTHALLGRYGLLDQMQVFRPHPARDRDLCRFHADDYVSFLRSVTPETQQDQIRALKRFNVGEDCPVFDGLYSFCQTYAGGSVGGAVKLNHGHDIAINWAGGLHHAKKCEASGFCYVNDIVLAILELLKYHQRVLYVDIDIHHGDGVEEAFYTTDRVMTVSFHKFGDYFPGTGDIRDVGHSKGKYYSLNVPLDDGIDDESYQSLFKPIMGKVMEVFNPGAVVLQCGADSLSGDRLGCFNLSIKGHAECVRFMRSFNVPLLLLGGGGYTIRNVARCWCYEVCIPYGENTHLLCLSSFHFSVVCYSINSNKPCVLSEVIYRHRTTGVALGHELTDKMPPNEYYEYFGPDYTLHVAPSNMENKNTRHQLDDIKSKLLDNLSKLRHAPSVQFQERPPEAELPEQDEDKENPDERHDADSDVEMNDAKPLQDSGRCCSVRCVHVDVNSVAAEHSRGTGPVADGVGSSKQTFPNATSRMAIDEPNALES

SEQ ID NO: 21210 - protein, 433 aa, Zea mays
  VARIANT 24: note = Ancestral polymorphism is A, Derived polymorphism is S
  VARIANT 352: note = Ancestral polymorphism is A, Derived polymorphism is V
MVDGFRWIRPGSFVLYLVFFFLSAALSEANIGDFDEYWQQRKLMADAAAEATSVEKEDIGTRREMMGTTTRKSKFSGPCRATNPIDRCWRCRQDWATDRKRLARCAKGFGRNTTGGLAGKFYVVTDGTDDDVVNPRPGTLRWGVIQIEPLWITFAKTMIITLKEELIIRGDKTIDGRGVQVRITNGAQLTLQFVNNVIIHNIHINDIVSSNKDGGYVRDSPDHFGWRTVSDGDGITVFGSTNVWLDHLSLSNCQDGLIDVIAKSTGVTISNCHLTNHNDVMLFSSSDKHPEDQIMQITVAFNHFGRGLVQRMPRCRWGFFHVVNNDYTHWLMYAIGGSKAPTIISQGNRYIAPPNLAAKQVTKQHDTPESVWKNWVWHSENDLFMEGAYFTVTGGQINRQFNKKDLIKPRNGSYVTRLTRYAGSLACTPGKPC

SEQ ID NO: 21211 - protein, 241 aa, Zea mays
  VARIANT 38: note = Ancestral polymorphism is E, Derived polymorphism is K
  VARIANT 55: note = Ancestral polymorphism is R, Derived polymorphism is S
  VARIANT 70: note = Ancestral polymorphism is A, Derived polymorphism is E
  VARIANT 92: note = Ancestral polymorphism is L, Derived polymorphism is I
MSEGDATQLALEKGSPQVSNDDGSSSLATVHKLKVDTEDAGSKIESPTPKKLESRSKWVVVSSLARNLLEERHKDLLNLFNRMESSIRLLRLRKRMATFNNIATQVEILAKRKLSYCHLAQMKYLFREAIPIKRVLLHDEKSLCMYADMEIILVMDVVEYTSPDHSPSMAICDAFYSKLLTFLDAHHKVPTKEQVDALSKELFALSTVTGILSTLLATCVIVLTNKIYNLSEQIDAIVSLF

SEQ ID NO: 21212 - protein, 315 aa, Zea mays
  VARIANT 11..315: note = Derived polymorphism lacks residues 11 to 315
  VARIANT 38..315: note = Derived polymorphism lacks residues 38 to 315
  VARIANT 41: note = Ancestral polymorphism is R, Derived polymorphism is H
  VARIANT 44: note = Ancestral polymorphism is T, Derived polymorphism is I
  VARIANT 46: note = Ancestral polymorphism is G, Derived polymorphism is D
  VARIANT 55: note = Ancestral polymorphism is A, Derived polymorphism is V
  VARIANT 59: note = Ancestral polymorphism is T, Derived polymorphism is M
  VARIANT 64: note = Ancestral polymorphism is F, Derived polymorphism is V
  VARIANT 65: note = Ancestral polymorphism is M, Derived polymorphism is I
  VARIANT 77: note = Ancestral polymorphism is L, Derived polymorphism is V
  VARIANT 84: note = Ancestral polymorphism is M, Derived polymorphism is V
  VARIANT 119: note = Ancestral polymorphism is T, Derived polymorphism is I
MIPQSQSSSLQRLQHVEKRIVRVLELAGAVMEELGYSQGPRTDTVGVHCREFMMAMKNTCHRLFMVTHCLIMFPSNLNFTRVNMFCRCVDELESQLSKHGSLKKLYFYHQHLTTVFRNTTFGPEGRPQHCCAWLGAACSFPECASAIIPEEVNKIGRDSISYVESLIKSILGGLEGLINILDSEGGFGSLEMQMKNHNPLHSQIAEVKIDISASASVAAGNKLCKGAACYFSDSSNSSKDAKERSTSMRKLIIAVILCIIFMTVEVVGGIKANNLAILTDAAHLSDVAAFAIIVILSLGCWMGSNTTTIIWVLLD

SEQ ID NO: 21213 - protein, 156 aa, Zea mays
  VARIANT 70: note = Ancestral polymorphism is V, Derived polymorphism is M
  VARIANT 66: note = Ancestral polymorphism is K, Derived polymorphism is M
  VARIANT 58: note = Ancestral polymorphism is A, Derived polymorphism is T
MAPASSLVAGSSTHSVASATSSGYDALSPSDPAMILVPRGAQVAPHATLLASFVAPSAHGGVGVSKCLFVMFSIDECGIAGDIVVGELGFFAIGLKYSHFEQNHYACRLCTMTVSDSPILVADMHTDGDILLKSELIDPSSRSLHQTFSFGQERKP

SEQ ID NO: 21214 - protein, 147 aa, Zea mays
  VARIANT 103..147: note = Derived polymorphism lacks residues 103 to 147
  VARIANT 83: note = Ancestral polymorphism is L, Derived polymorphism is H
MLPCWTQEPSSGQMKEQFVVEMLARPSSAAGSGPGRSQQRQEDASSAQGSRPQSSAASDTPVAQQPDANSVRAKLELAKNTKLEAAKRKLQEGYQEFDNAKKQRSIQMVHPQNLPKQANNTQNFQPSGPAASQGMAATGIGSSSNSF

SEQ ID NO: 21215 - protein, 439 aa, Zea mays
  VARIANT 216: note = Ancestral polymorphism is Q, Derived polymorphism is L
  VARIANT 102: note = Ancestral polymorphism is G, Derived polymorphism is R
  VARIANT 67..439: note = Derived polymorphism lacks residues 67 to 439
MLEAKPPSPGSGAAGAAAHIHGHRRWAAPLLASVLLSSLLITASLFFSSSRALLLSFSPLPSAASAEPLFVEAKLRQQMRAEERPTRGAVPRIAYLISGSAGDGAALRRTLRALYHPVNTYVVHLDLEAPAAERAELASAIHADPVYARFRNVKVVTRANLVTYRGPTMVANTLHAAAILLREGGNWDWFINLSASDYPLVTQDDLLHVLSELPRQLNFIEHTSDIGWKEYQRAKPVIIDPGLYSLQKSDVFWITEKRSVPTAFKLFTGSAWMMLTHQFIEYCIWGWDNLPRTVLMYYANFLSSPEGYFHTVICNVPEFRNTTVNHDLHFISWDNPPKQHPHYLTLADFDGMVNSNAPFARKFGREDPVLDKIDQELLARRPDGFVPGGWTDLLNTTEKGKPFTVERVQDLRPGPGVDRLKKLVTGLLTQEGFDDKHCL

SEQ ID NO: 21216 - protein, 100 aa, Zea mays
  VARIANT 57..100: note = Derived polymorphism lacks residues 57 to 100
  VARIANT 52: note = Ancestral polymorphism is T, Derived polymorphism is I
  VARIANT 5: note = Ancestral polymorphism is T, Derived polymorphism is M
  VARIANT 4: note = Ancestral polymorphism is V, Derived polymorphism is L
MEELTEGVNNLAITEPQMKNKIQVSNTKKPLFFYVNLAKRYMQQHEEVELSTLGMSKTLLLFMILLPFYTLFIISAIATMVTVAEILKNNRLVVEKSKDL

SEQ ID NO: 21217 - protein, 484 aa, Zea mays
  VARIANT 436..484: note = Derived polymorphism lacks residues 436 to 484
MAPIASDSPAANSPASPPAATPAPAATFPSQPSPGKSLSSLPPAAAPFYPARTGPSGRSKPLRWADVVEEGEISPPCAPASYRGALLRAPAKNDRGAGTSAAQSRSSSLAAAPRLRSIVVRPREPTRPRSAARRKMRRPSAAAPRGHRRRGRVSPPDHDGWRRVLPQQRCSPPSWPGGSSAAVRSARPPACLEGKCLNCLSFSHRVATCRLPPRCLRCRGFCHLARDCKRPRRASGAGAGLAGAGAPRRFVRARRVGSSTPCGSNAEGSTPPSSPNLPHRVADGSAATGLLPGHHLLRPSVAVCFIDRSDDISGEEDSLATSLLVRAGNGRRDIPIAEARRAFLALPRVRAGDFELRPSHPDNFLLLPASAGVRDLLLGARPVVVHGTTLVLHPWTRLAHATRVELFFKVKLEIVGIPPHVWSRDTASKILALACWIEKVDAASADKTDQSFFGVTAWTNDPSAIPRSVSLLIAENELRVVHSD

SEQ ID NO: 21218 - protein, 470 aa, Zea mays
  VARIANT 324: note = Ancestral polymorphism is A, Derived polymorphism is V
MLGLRFSDFACVPANGSRGGLLVAVRGPDISIADVLAGSYSVSVKLSGPRIGDPWWLSTVYGPQGIAEKELFLEEVAAARDACEGPWVVMGDFNLILDETDKSNGRVNRRLMQEFRHCVSDLELQDLHLHGSWSAKNVGTVRDQLLMAREVILRLERAQDSRLLSPAEARLRADIKLKCLGLSSLERTIARLRSRVRQLSDGDANTKFFHMVARGKKKSLTLHELRSEGRETDLTGVVCSLGCKIVELPVTYLGLPLHSGAIPKNKVQGLVDKVAARLPAWRGSMMSRGGRLVWIKSVMTAVPIYAMMANGVHSIVVHGSARLAAINARGRNPRRLGSPLSRKPRGPTVPAAPNILSPHPKSPPTDLRHQRSDPASWPTSAESLLGTAWAVDPDTALRLVANLRCVRGSGMSDREGFYASALWLHARHPHTLALNAAPSPSLATSRTSPSCSTESCTAGCPPGPQARRHA

SEQ ID NO: 21219 - protein, 477 aa, Zea mays
  VARIANT 149: note = Ancestral polymorphism is R, Derived polymorphism is W
  VARIANT 158: note = Ancestral polymorphism is E, Derived polymorphism is D
  VARIANT 195: note = Ancestral polymorphism is A, Derived polymorphism is T
  VARIANT 206: note = Ancestral polymorphism is V, Derived polymorphism is L
  VARIANT 241: note = Ancestral polymorphism is T, Derived polymorphism is M
  VARIANT 367: note = Ancestral polymorphism is R, Derived polymorphism is W
MDEYIYQSLFLSVLAVALLQLVKMALKPRPRLPPGPWKLPVIGSMHHLVNVLPHRALRDLADVHGPLMMLQLGQTPLVVASSKETARAVLRTHDTNFATRPKLLAGEIVGYEWVDILFAPSGDYWRKLRQLCAAEILSPKRVLSFRHIREEEVMLRVEEIRAAGPATPVNLSVMFHSITNSVVSRAAFGKKRKNAAEFLAATKAVVGLSSGFNVPDLFPTWTTVLAKLTGMTRSLKEIHKTVDTILEEIIVERKRIRDEKIKGGDAAEDVDENLVDVLIGLQEKGGFGFQLTNSIIKAIILDMFAGGTGTSGSAMEWGMSELMRNPPYPKLVIKEALRLHPPAPLLVPRESIEECELDGYTIPAKSRVIINAWAIGRNPKYWDDAGEFKPERFEDGSRDFTGSSYEFLPFGSGRRMCPGFNYGLASMELAFVGLLYHFDWSLPEGVKDVDMGEAPGLGVRRRTPLMLCATPFVLVPA

SEQ ID NO: 21220 - protein, 214 aa, Zea mays
  VARIANT 18: note = Ancestral polymorphism is G, Derived polymorphism is E
  VARIANT 50: note = Ancestral polymorphism is T, Derived polymorphism is A
  VARIANT 68: note = Ancestral polymorphism is G, Derived polymorphism is S
  VARIANT 81: note = Ancestral polymorphism is C, Derived polymorphism is Y
MPREESGTARQSSVGGRGRMEQQPHMFCSNLKLSYIVQGMTSFDILRLIALGVDVYLLLQQYKLLRHSGAKVPDCGGTGLCSRCKGECFVFKQLSKETATRSHKAAKNMATGYTSGLSTNGPTATSTPPPACLHKMAGVLPTINTHVKRSWDVHVCGSTTRASVGTLILSSWQWKSHNRTMELVASSGVALGLALIYNKALFPVRVPITIAFMS

SEQ ID NO: 21221 - protein, 404 aa, Zea mays
  VARIANT 25: note = Ancestral polymorphism is G, Derived polymorphism is A
  VARIANT 125: note = Ancestral polymorphism is D, Derived polymorphism is G
MRFFKGSKVEVLQEAEVPFGSWRPGEIISGNGHTYLVRYDESPVDSSVAVERMPRRLIRPSPPTDDPVRWSLGSILEAFDSYSWKVAEVVRVLRKNQYLVRLLGSSLELSAHASDLRLRKLWLDDRWIVTQKYSARCLDGAFRGQSEDGNLDCNLRKDSHIQLENRNAFEGDTSRGMKRKSSAISTHPHCSDISKRLQCSDATKRFWTLNRDGRHTKLVDRGFFPLAEKVDAVDSPCLMLRGKYMHASHKGHTRTTEEFSDTESTSSSVGSSSPNSTPHRSQYYNLVNQSGDICSRTDGDEAFTFERETSEHGNDGSRGETHLLELHAYRATMLALYACGSISWEQEALLTNLSKTLGKGNLILLMNFPGPRLEACKASFHRLSRAKSVVPDWYWLLDKRVKLD

SEQ ID NO: 21222 - protein, 565 aa, Zea mays
  VARIANT 199: note = Ancestral polymorphism is E, Derived polymorphism is D
MEAEAEAEAASSGRWCTWNLAAVAAVGACLLLMHVAARVADALWWRPHRLEAHFARQGVRGPPYRFLLGCVREMVALMAEATAKPMSPPDSHDALPRVLGFYHYWRKIYGPMFLIWFGPTPRLTVADPELVSEVLLTRADAFDRYEAHPVVRKLEGDGLVSLHDDKWALHRRVLTPAFYPDNLNRLAPHVARSVVALAERWRAMASAAGGEVEVDVAEWYQAVAEEAITRATFGSSYDSGRVVFRMQARLMAFASEAFRKVFVPGYRFLPTKKNRLQWSLDREIRRGLVTLIGHRSDEAAQDDDSELNDKGSSNGFRDLLGLMINASDKKEEKKQEEARAMPVEDMLEECKTFFFAGKQTTTNLLTWATVLLAMHPDWQERARQEVLAVCGADELPSKEHLPKLKTLGMILNETLRLYPPAVATIRRAKRDVTLGGVSIPRDTELLIPIMAMHHDGALWGPDATQFNPARFGGGAAKAAAHPLAFIPFGLGPRMCIGQNLALLEAKLTLAVVLQRFRLARSPSYVHAPTVLMLLYPQYGAPVIFRPVSSQLSVSDRTETTRPPRH

SEQ ID NO: 21223 - protein, 309 aa, Zea mays
  VARIANT 244: note = Ancestral polymorphism is D, Derived polymorphism is Y
  VARIANT 23: note = Ancestral polymorphism is S, Derived polymorphism is R
MAKSTPLLSFVYLLCIAHVTSISFDYNFSIPGVLTSANIKYMSNGSRGTDRIDLTKDAIWSTGRVAYGQPLQLWDDTAKVASFTSNFTFAIKPHNSTNQATYPKKLLFKLSPCSQLGDTCCALQADGMAFYVGPWPPKLPEDSNGGFLGLFNNPIGTNIDFPPTIAVEFDAFRNDWDPNNTMNHIGVDVKSITSRAYTPLPDGSFNGTMSAWVRYDANVSTLSATLRFDDLPQLGLYNVSAIVDFKDAGLPPYAAVGFSGATGDFIERHQILSWSFESTLTGVVVNVNNTGKCLSLSLLSLAILLQKEN

SEQ ID NO: 21224 - protein, 181 aa, Zea mays
  VARIANT 146..181: note = Derived polymorphism lacks residues 146 to 181
  VARIANT 109..181: note = Derived polymorphism lacks residues 109 to 181
  VARIANT 93: note = Ancestral polymorphism is G, Derived polymorphism is C
  VARIANT 59..181: note = Derived polymorphism lacks residues 59 to 181
  VARIANT 49: note = Ancestral polymorphism is T, Derived polymorphism is A
  VARIANT 31: note = Ancestral polymorphism is I, Derived polymorphism is N
  VARIANT 15..181: note = Derived polymorphism lacks residues 15 to 181
METALLPPVFPTSAYNDSSIFNHEEPSGGEIMEHILALQKMAIRIISLTASASGCERNWSCFEGKKDKANNNNKVDPLLATDAASAQGWIVEGRDEESSDVNTVTGLTWQQIVDACGSEEDTKLWKSATLAQPTDIEEEKLPSENEEEEPINEEEIEFESDKDEVITTGYELQEQEVVNDD

SEQ ID NO: 21225 - protein, 79 aa, Zea mays
  VARIANT 71: note = Ancestral polymorphism is I, Derived polymorphism is T
  VARIANT 32: note = Ancestral polymorphism is K, Derived polymorphism is M
MAFLYEDILKAKKEILTGLGNVDKAATQNLYKSIIEIIDSKMKGRLDTPLQLDAYFLNPYYAYVDTDFGLTKIYAMPVK

SEQ ID NO: 21226 - protein, 609 aa, Zea mays
  VARIANT 553..609: note = Derived polymorphism lacks residues 553 to 609
  VARIANT 265..609: note = Ancestral polymorphism lacks residues 265 to 609
  VARIANT 258: note = Ancestral polymorphism is L, Derived polymorphism is R
  VARIANT 244..609: note = Derived polymorphism lacks residues 244 to 609
MASSGLAYPDRFYAAAAYAGFGAGGATSSSTACTAVCSSPSICFGDRNSVGDFGFCFVQATVGPCNVPKPRAWNPVEQSKWASWHGLGSMPSAEAMRLFVKILEEEDPGWYSRVPEFNSEPIVDIQMHKPKEEPQIVPASTNGTSISEPKIISENGSSVETQDIDVILEGLSTVSSLDEWTPLAISGHRPKPRYEHGATVLQDKMYIFGGNHNGCYLSDLQALDLKNLTWSKIDAKLEAESSDSAKTSQIAPSNGGCLLFCTILWITWGNKFFSIAGHTKDPSEGVTVKEFDPHTCTWSIVRTYGKSPVSRGGQTVTLVGTTLVLFGGEDAKRCLLNDLHILDLETMTWDDVDAIGTPPPRSDHAAACHADRYLLIFGGGSHATCFNDLHVLDLQTMEWSRPKQQGLTPSPRAGHAGATVGENWYIVGGGNNKSGVSDTLVLNMSTLTWSVVSTAEGRVPLASEGMTLVHSNYNGYDYLISFGGYNGRYSNEVYTLSLKSDFKSTTKEETVSDLGSSNQRNFKPSVANLLLSSQDVSNLRSMLRNYDRSFKVWMHWKRRSSCFDDTEPRQSKQRWTQSSGKVLGACGAGSLVPLLMINLNRDRVVRAAL

SEQ ID NO: 21227 - protein, 121 aa, Zea mays
  VARIANT 8: note = Ancestral polymorphism is K, Derived polymorphism is E
  VARIANT 29: note = Ancestral polymorphism is S, Derived polymorphism is I
MWTAKAAKMAFCGKISNGKKLKFWEGDSSLAIQYWVKYRTYRGSIGSGSRCKHCREAKSDGSATCLKNYLAHRGKDDVKNCPSVPLEVKSLFAGELDKTKEKEETEFGRGNRYMKQQELIM

SEQ ID NO: 21228 - protein, 431 aa, Zea mays
  VARIANT 8: note = Ancestral polymorphism is V, Derived polymorphism is A
  VARIANT 233: note = Ancestral polymorphism is P, Derived polymorphism is S
MGKKVAVVVGGSVAGLACAHAVAGAGWEVVVLEKAAAPAAGSGTGAGLGLDAQSMEIISRWIPGWGIDAVTLPLAVDLNIATDSATKAARTLARDEDFKFRAAHWGDLHRRLHEELPPAVTVLWGHQFLSFEAPDDTRGVVATARVLRTGGTVEATGDLLIAADGSTSSVRRSFLPDLKLRYSGYCAWRGVFDFSGKESSDTMTSIRRAYPELGNCLYFDLAYKTHAVLYELPRSRLNWLWYINGPEPELAGNSVTMEATDAMVGRMRNEAERVWCPELARLVRETAAPFVNVIYDADPLRRLSWTGGRVVLVGDAAHPTTPHGLRSTNMSVMDACTLGQCLANWNSEPTPARALAEYEAVRLPVVAEQVLHARQLGRLKQGLPVDGEAEDGFDVTTAKAEVLQLRQRTMPFFDGAPAAVGGDFPLVGSTR

SEQ ID NO: 21229 - protein, 673 aa, Zea mays
  VARIANT 140: note = Ancestral polymorphism is K, Derived polymorphism is T
  VARIANT 408..673: note = Derived polymorphism lacks residues 408 to 673
MEYSSSEDEGLVGDFIDAEDNTFTKNIDQGTGVMASQIHGDDPSVGSMPPVIGNELLMAADVLAKNDEPRMGMEFDSDAAARAFYNAYALCFGFGIRVARSRSERRKGVEVLVMKRFVCLKEGHHRKKKPVEPSNKKKRKRLSIRDGCPAMMEVVRRGPDRWVITKLVLEHTHVIVSADRAREVQLHRLSGKFQEHENQLQEVRRNVFGDTNAQGLFNYFKKMQSDNSSFFFSIQVDSKNYVSNAVWVDARARMAYTYFGDAVYFDTTCSQNENMLPFAAFTGVNHHGDTVVFGCALILDRTESSYGWIFETWLTAMDSRLPFSLTTDEGKGIAAAVAKVFPQCFHRLCRWRILSRCKKRLTDARTRFPGLHEELKRCVNGCDTAVIFDMLWGSILDKYGLRDDNWLQSLYEIRHKWVPAYLTSFFFAELSLTHRVETVSKFYRNNFSSRVSLNTFISRFDQYIDGLYASEAQKDITSFSPEQFLKTDMVLEKQARSIYTRAAFETFQLELVEAMQHYAVKVQDGSYMKYYVERNGDPPTRHTVFYNVAEKKAWCECCRFAFSAILCRHVLSVFLLAGVIMLPEPCITKRWTKKAKSGPELIGLNVGNGSSSPDSVASRYNDLVRDAIKCAEKGTVSAGAFRVAKEVLRKAFMDIRGHGEKLCKDALRSASSR

SEQ ID NO: 21230 - protein, 365 aa, Zea mays
  VARIANT 163..365: note = Derived polymorphism lacks residues 163 to 365
  VARIANT 335..365: note = Derived polymorphism lacks residues 335 to 365
MAAAMANTTCLRSRLLVLPPPPAPRTVVSFRLRPCATTISSSSRKRRPRLAARAAPPGGAVAPASAASKEDDQGEMGSGGGLSADDAERLCQFLRADLPHLFDDVGIDRSAYDDRVRFRDPITRHDTIDGYLFNIRLLKLLFRPDFYLHAVKQTGPYELTTRWTMVMKFMLLPWKPELVFTGLSIMGVNPKNLKFNSHVDLWDSIQNNEYFSSEGLWDVFKQLRIYKTPDIETPNYLILKRTAHYEVRSYAPFLVVEAKGDKLTGSSGFNNVTGYIFGNNASSEKIPMTTPVFTQASDNTLSDVSIQIVLPMNKDLDRCDKFTSSKYSSYFAEGRRRHCCSEKIQWTTKRRNCAPEGEGSALPVT

SEQ ID NO: 21231 - protein, 73 aa, Zea mays
  VARIANT 33: note = Ancestral polymorphism is D, Derived polymorphism is N
MLMNRCKLTSSMSTGIFFPPKQIKDPETKKPENWEDKEYIPDPEDKKPEGYDGIPKEITDPDAKKVFMWLFVM

SEQ ID NO: 21232 - protein, 447 aa, Zea mays
  VARIANT 113: note = Ancestral polymorphism is V, Derived polymorphism is D
  VARIANT 354..447: note = Derived polymorphism lacks residues 354 to 447
MGKEKTHINIVVIGHVDSGKSTTTGHLIYKLGGIDKRVIERFEKEAAEMNKRSFKYAWVLDKLKAERERGITIDIALWKFETTKYYCTVIDAPGHRDFIKNMITGTSQADCAVLIIDSTTGGFEAGISKDGQTREHALLAFTLGVKQMICCCNKMDATTPKYSKARYDEIVKEVSSYLKKVGYNPDKIHFVPISGFEGDNMIERSTNLDWYKGPTLLEALDLINEPKRPSDKPLRLPLQDVYKIGGIGTVPVGRVETGVIKPGMVVTFGPTGLTTEVKSVEMHHEALQEALPGDNVGFNVKNVAVKDLKRGYVASNSKDDPAKEAASFTSQVIIMNHPGQIGNGYAPVLDCHTSHIAVKFAELVTKIDRRSGKELEKEPKFLKNGDAGMVKMVPTKPMVVETFSQYPPLGRFAVRDMRQTVAVGVIKSVEKKDPTGAKVTKAAAKKK

SEQ ID NO: 21233 - protein, 425 aa, Zea mays
  VARIANT 64: note = Ancestral polymorphism is A, Derived polymorphism is S
MRSAGAAATVTRLAQRVVAPAAPTPRGQLPLSWLDRYPTQRALIESLHVFKGRADAGAEAPARAIERALAAALVSYYPIAGRLAVSDEGELVVDCTGEGVWFVEAGASCALADVDYLEYPLMVPKDELLPHPTYPESDLLPEDSLILLVQVTQFACGGFVVGFRFSHAVADGPGAAQFMAAVGDMARGHAAPLVAPAWGREAIPNPPGAAVGALPVPTELRLQYLAMDISTEYIEHLKARFLEQAGQRCSAFEVLIAKAWQSRTRAAGFARGSPVHVCFAMNARPALGVPRGFYGNCYYIMRVSAAAEAVSDASVCDVVRLVREGKKRLPGEFARWSAGGGVDDPYRITSDYRTLLVSDWSRLGFAEVDYGWGCPVHVVPLTNLDYIATCILVRPSAHKPGARLITQCVDAGAVDAFHKDMMRLD

SEQ ID NO: 21234 - protein, 285 aa, Zea mays
  VARIANT 142..285: note = Derived polymorphism lacks residues 142 to 285
  VARIANT 133..285: note = Derived polymorphism lacks residues 133 to 285
  VARIANT 123..285: note = Derived polymorphism lacks residues 123 to 285
  VARIANT 121..285: note = Derived polymorphism lacks residues 121 to 285
  VARIANT 109..285: note = Derived polymorphism lacks residues 109 to 285
  VARIANT 100..285: note = Derived polymorphism lacks residues 100 to 285
  VARIANT 81..285: note = Derived polymorphism lacks residues 81 to 285
  VARIANT 66..285: note = Derived polymorphism lacks residues 66 to 285
MAELQDDHRPEGYDPDSRAGAGAEPVGIEIRRSRAGLGAEEPVLAPTPVLAPVEKPREVSERERRQQEEMAAELRARKSTQWKGRRVVWDYRKAERALAQLENREVEPQAPEGEEKEKGAEEEDDVITEEDLQNILSKLRDQYQYCLYCGCKYESPEVLANECSGPDNTVMFHLSSISCTYVQDGAIDRTISHDTSPLTIYATSSIRFSYCERCTYWLTTMTDPILFERGGLPAPGWILGFGGSTVSLFAQMEIMMSCLEIHNALLSIDYGAVISSNRSTVCRVQ

SEQ ID NO: 21235 - protein, 472 aa, Zea mays
  VARIANT 35: note = Ancestral polymorphism is A, Derived polymorphism is V
  VARIANT 85: note = Ancestral polymorphism is D, Derived polymorphism is V
  VARIANT 174: note = Ancestral polymorphism is S, Derived polymorphism is W
  VARIANT 231: note = Ancestral polymorphism is T, Derived polymorphism is M
  VARIANT 254: note = Ancestral polymorphism is P, Derived polymorphism is L
MSPRPHFLVLTFPFQGHIAPALRLARQLLAAAPDALVTFSTTEVAHRRMFPAKPNDGAKDSDEDGRLEFLPFSDGTEAGYVRSADLGSFNAYMASFHAAGARSAAEIVDALAARGRPVSRVVYTLLLPWAADVARDRGIPSALYWIQPVSVFAIYHHYFHSHAGVVADHLHDPSFVVEMPGLAPQPVGDLPSFLTDSTDPSNMFHSVFTTIRDLIETLDKESPRSTVLVNTCRELEVGALAAVGAHHDVLPVGPVLPSGGDAGIFKQDDDAKYMEWLDAKPANSVVYVSFGSLTTVAREHLEELLRGLEESGRPYLCVIRKDNKAALADAETKVDEELKNGIVVEWCDQVRVLSHAAVGCFVTHCGWNSVLESLAAGVPMVCVPRMSDQRTNAQLVVREWRVGVRAQVDDGGVLRAAEVRRCIDEAMGNLEAAAEVRRMAAEWKQVVTKAMGKGGSSDRNLMTFVDGARNAV

SEQ ID NO: 21236 - protein, 140 aa, Zea mays
  VARIANT 115: note = Ancestral polymorphism is T, Derived polymorphism is I
  VARIANT 110: note = Ancestral polymorphism is V, Derived polymorphism is M
  VARIANT 106: note = Ancestral polymorphism is N, Derived polymorphism is I
  VARIANT 79: note = Ancestral polymorphism is R, Derived polymorphism is C
  VARIANT 72: note = Ancestral polymorphism is G, Derived polymorphism is E
  VARIANT 69: note = Ancestral polymorphism is S, Derived polymorphism is R
  VARIANT 47: note = Ancestral polymorphism is N, Derived polymorphism is K
  VARIANT 35: note = Ancestral polymorphism is H, Derived polymorphism is Y
  VARIANT 33: note = Ancestral polymorphism is A, Derived polymorphism is T
  VARIANT 15: note = Ancestral polymorphism is A, Derived polymorphism is V
  VARIANT 2: note = Ancestral polymorphism is P, Derived polymorphism is H
  VARIANT 1: note = Ancestral polymorphism is M, Derived polymorphism is I
MPAASVWFDSVARVAPSGLLVLTNVTVAMTDHALHLIPLPFCESASNSTVWSFSVLFLFTIVGQSFHLSSHELAFFISRTRSLSTTMSIQYLGLLNITDGAEATSNHILVVGFDTVLNYEFGDINHNHVDIDIDSLWSVI

SEQ ID NO: 21237 - protein, 123 aa, Zea mays
  VARIANT 109: note = Ancestral polymorphism is G, Derived polymorphism is E
  VARIANT 102..123: note = Derived polymorphism lacks residues 102 to 123
  VARIANT 98: note = Ancestral polymorphism is D, Derived polymorphism is G
  VARIANT 93: note = Ancestral polymorphism is L, Derived polymorphism is I
  VARIANT 92: note = Ancestral polymorphism is S, Derived polymorphism is N
  VARIANT 89: note = Ancestral polymorphism is K, Derived polymorphism is N
MASPDLLFNLRNLFYLGAYQAAINNIDILGLDAAAAAERDAIVFRSYIALGSYQVRTHLASGASAATSLQAVKLLALYLTGDKRRYVMKKINISKQNDKFQQTAYQEGEIGNDDTLWRISPRR

SEQ ID NO: 21238 - protein, 115 aa, Zea mays
  VARIANT 78: note = Ancestral polymorphism is R, Derived polymorphism is Q
  VARIANT 74..115: note = Derived polymorphism lacks residues 74 to 115
  VARIANT 65: note = Ancestral polymorphism is D, Derived polymorphism is N
MALLVDPPDIKREMQPAPPPSAAASASQMAWPLDWPVDGCSLNPPSPPLYQSSVWTGMLTVCYFDGKTYELVGQSRQRSTMGKDVLNNESFCLETIGYKKLASGFVKAFVNHLNH

SEQ ID NO: 21239 - protein, 852 aa, Zea mays
  VARIANT 385..852: note = Derived polymorphism lacks residues 385 to 852
  VARIANT 423..852: note = Derived polymorphism lacks residues 423 to 852
MAGGGGGARGSDRAGAARSPTTTTAIQSTIQSIKEVVVGHSDADILDTLRESNMDPNETAQKLLNQDPFHEVKRKRDKKKESAGQKSFADSTAQVEQNSQWMKPHTQKMENDQRTPKQGQMSGPTREFRVVRDNRFQHGVVENRPELGHKGSANVQMSDRSTLVQSGRNRSPATTSGDQITHQNAMQNSNSDTTQGKRDAQGTTEKHVKPYLKNPQNEQHFPGSDPAHGSANVRIAGGTVGPAQRHVGVVNSTRQFAARSGSQMHAPSGSYANIQRGSFTSVGASGRYSAFMSRNIQQNQRPDTMFRGRPTVRSFVAQNTNRYHQGSTSNQKAVHPIKEWKPKSTKKSPTIDADNSIADATSPSASNCESANTLNVNELPEKISQTNLHEVEHVIIPEHLRVPEYEQTKLRFGSFTSGLDSEQVSASTPQDTEQPEHVQESVQQASEYDSLDAGPDDMDEQARSSQHLSTSTAEISLPPSEDSDRMSGQVENDDGLGLVQSDTPIGAADGDNTQITSTLTAFSAYSHEDPNMHTNNEAQLYGLVEPNVHPQVLASSSQGYPSENPEADNAVQVFRMPESNVHSQVLPSTSEALNPQIVSNSPVSISSQQQQHISQQQAAAQMYPQMHVQHFPNFMPYRQLYSPVYPMPMPNYSPNVPYPSNGNNYLQMPSGGSHLTAGSVKYGVSQFKPLPSGNPSGYGNYTHPAGFTMGSPGVIGATVGVDDVNRMKYKDNIYASTPQVETSDIWIQQAREMPPMQVPSYYNIPGQATPGAFVPNPANASFNATAQSSHVQFPGLYHPQQPPSIVSPHPMVHQQVPSAIGPNVGVGVAAPGPQVGAYQQPQLGHMNWRPSF

SEQ ID NO: 21240 - protein, 746 aa, Zea mays
  VARIANT 96..746: note = Derived polymorphism lacks residues 96 to 746
MPLQLEIKRKLAQRSERVKSVDLHPTEPWIMSSLYSGSVCIWNYQTQTMVKSFEVSELPVRSAKFIAQKQWVVAGADDMFIRVYNYNTMDKVKLFEAHTDYIRCVAVHPTLPYVLSSSDDMLIKLWDWDKGWMCTQIFEGHSHYVMQVTFNPKDTNTFASASLDRTVKIWSLGSPDPNFTLDGHSKGVNCVDYFTGGDRPYLITGSDDQTAKVWDYQTKSCVQTLEGHAHNVSAVCFHPELPIIMTGSEDGTVRLWHSTTYRLENTLNYGLERVWALGYMKGSRRVVIGYDEGTIMIKIGREAPVASMDSSGKIIWAKHNEVQTVNIKAVGADAEIADGERLPLAVKELGSCDLYPQSLRHNPNGRFVAVCGDGEYIIYTALAWRNRSFGSALEIVWSTEGEYAARESTSKIKIYSKNFQERKSIRPAFSGERIYGGVLLAICTNDFICFYDWAECRLIRRIDVNVKNVYWADSGDLVTIASDSSFYILKYNRDLVSSHLDGGASVGEEGVEDAFELLHEINERVRTGLWVGDCFIYNNSSWRLNYCVGGEVTTMFHLDRPMYLLGYLANQSRVYLIDKEFNVVGYTLLLSLIEYKTLVMRGDLEHANIILPSIPKEQHNSNRIPEAALMARSYLPSKVSDIVSIWKKDLQKVNSKAAESLADPAEYPNLFEDWQIALNVEATVAPKRGVYPPAEEYMTYAERSNDSLVEVFKSMNVEEVPSDNGDPVHEEQLGSAQKHMLYLLVH

SEQ ID NO: 21241 - protein, 159 aa, Zea mays
  VARIANT 97..159: note = Derived polymorphism lacks residues 97 to 159
MPTGRLSGNITQDWEPVVLRRTKPKAADLKSSKAVNQALRSGAAVETVRKSAAGMNKHSTTVAPARKLDETTEPTAVERVAVEVRAAIQKARVAKGWSQAELAKRINERAQVVQDCRSTRAARRRRPRPCLPRWSALSRSSSAGRASARHWRPSGSDLM

SEQ ID NO: 21242 - protein, 171 aa, Zea mays
  VARIANT 33: note = Ancestral polymorphism is G, Derived polymorphism is R
  VARIANT 43: note = Ancestral polymorphism is T, Derived polymorphism is I
  VARIANT 65: note = Ancestral polymorphism is K, Derived polymorphism is N
  VARIANT 130: note = Ancestral polymorphism is D, Derived polymorphism is G
MQSLQDKASEWSGVAAADAFAIDDVNIFEYLGGTPQPFVDLSTNFYTRVYEDEEEWFREIFGGSKKEDAIQNQYEFLIQRMGGPPLFSQRRGHPALIGRHRPFLVTHRAAERWLHHMQQALDATESIDVDSKTKMMNFFRHTAYFLVAGNEMTRQQGHGVACKHATSKPAE

SEQ ID NO: 21243 - protein, 376 aa, Zea mays
  VARIANT 194: note = Ancestral polymorphism is S, Derived polymorphism is L
  VARIANT 188: note = Ancestral polymorphism is G, Derived polymorphism is D
  VARIANT 183: note = Ancestral polymorphism is R, Derived polymorphism is H
  VARIANT 177: note = Ancestral polymorphism is A, Derived polymorphism is T
  VARIANT 170: note = Ancestral polymorphism is G, Derived polymorphism is E
  VARIANT 162: note = Ancestral polymorphism is A, Derived polymorphism is V
  VARIANT 110: note = Ancestral polymorphism is A, Derived polymorphism is V
  VARIANT 88: note = Ancestral polymorphism is L, Derived polymorphism is P
  VARIANT 79: note = Ancestral polymorphism is A, Derived polymorphism is T
  VARIANT 73: note = Ancestral polymorphism is F, Derived polymorphism is L
  VARIANT 69: note = Ancestral polymorphism is P, Derived polymorphism is L
  VARIANT 58: note = Ancestral polymorphism is I, Derived polymorphism is N
  VARIANT 56: note = Ancestral polymorphism is V, Derived polymorphism is I
MAAATTTNDALATDATASAARANSASATAYGSPTSHHGANGPGNGVPVSRLGRDHVVIFPFMVKGHMLPLLHFATALSTQHGRLRVTLVTTPGNVAFARSRLPASVGLVALPFPSFPPLPEGVESTDALSCPSLHLMFMHTTGLLRGTFAEFLAALPSPPLALVSDFILGFTRRVAADAGVRRIVFNGMSCFASAICKALAASPPASFEPGTMIQVPGMLEHVAVRVEEVLDGVTKRADPDNPFTRFFMDEISDSDRSVLAHKAVGGFVSHCGWNSVMESLTAGKPMLTWPMIAKQHLNARYVANILGTGVRIALKAGADVVGSVEVEKVRELMDAECKAVKRMRERAALAQQAAKSAVSHGGTSVMALLKLVEEP

SEQ ID NO: 21244 - protein, 81 aa, Zea mays
  VARIANT 47: note = Ancestral polymorphism is P, Derived polymorphism is R
  VARIANT 41: note = Ancestral polymorphism is G, Derived polymorphism is V
MASSIARTACLLVLTLFVVSAAIILPSSLCHGARGVGLGIGGGALDPDRPACVGVGACPVRGRPFPIVKPSPPSNGGDPHH

SEQ ID NO: 21245 - protein, 125 aa, Zea mays
  VARIANT 104: note = Ancestral polymorphism is A, Derived polymorphism is T
  VARIANT 100..125: note = Derived polymorphism lacks residues 100 to 125
  VARIANT 55..125: note = Derived polymorphism lacks residues 55 to 125
  VARIANT 54: note = Ancestral polymorphism is S, Derived polymorphism is Y
  VARIANT 52: note = Ancestral polymorphism is S, Derived polymorphism is G
  VARIANT 44..125: note = Derived polymorphism lacks residues 44 to 125
  VARIANT 41: note = Ancestral polymorphism is S, Derived polymorphism is R
  VARIANT 37: note = Ancestral polymorphism is L, Derived polymorphism is M
MLQGFHDSGFHAEKPLLVLPSCLLAPFVSAVPMPRSLRLGSHQQHPPALKLSSSQETTAIAAAMNTGRPTARMDVEVNEYQQSGPNNRHDPPILGHFLVQRIYALATCLEVSDFQVLTDISRRTQ

SEQ ID NO: 21246 - protein, 332 aa, Zea mays
  VARIANT 155..332: note = Derived polymorphism lacks residues 155 to 332
MRVGANPSLEWSQQYSKPYQIFLEETIYCETHKQLGMFMYMISHNASNQMLQKAFQHSGETIHRKISEVFDLVPTLTQCFVKLPSSVHTHTKIATDSRFMPFFQNCIGAIDGTHIPITIAEHRAPPYRNRKGTLSHNVMVAWDFDLNFTFVSCGWEGSASDAGVPRSAISKGFSVPEGKFYLVDGGYANTSSFIAPYRGVRYHLNEFRRRRSSQSGYANYRELFNHRHAILRNHIERAIGVLKKRFPILKVGTFHPIENQIKITAATVAFHNIIRGQNGDERWLDNQPNYISPSQYVDVPEGDTNYLNDTESSDGSALRDQIALQMWASYNI

SEQ ID NO: 21247 - protein, 70 aa, Zea mays
  VARIANT 20..70: note = Derived polymorphism lacks residues 20 to 70
  VARIANT 28..70: note = Derived polymorphism lacks residues 28 to 70
  VARIANT 35: note = Ancestral polymorphism is A, Derived polymorphism is T
  VARIANT 41: note = Ancestral polymorphism is T, Derived polymorphism is I
  VARIANT 42: note = Ancestral polymorphism is G, Derived polymorphism is R
  VARIANT 51: note = Ancestral polymorphism is S, Derived polymorphism is P
MLDDEKGDFVGTAVREVEEETGIKLNIEDMVDLMTLLDPATRGRMLPSPWSDGPHAGSMKEIDIERVCCL

SEQ ID NO: 21248 - protein, 451 aa, Zea mays
  VARIANT 127: note = Ancestral polymorphism is L, Derived polymorphism is Q
  VARIANT 74: note = Ancestral polymorphism is S, Derived polymorphism is R
  VARIANT 59: note = Ancestral polymorphism is S, Derived polymorphism is N
  VARIANT 45: note = Ancestral polymorphism is L, Derived polymorphism is V
MATSTTTNGAGATAANHGANGAPAAGRDHVVIFPFMAKGHTLPLVHFATALSVHHKSLSVTLLTTPANRAFAASRLPSSVRLVELPFPSLPPLPAGVESTDALPSMSLFPTFLRATALLREPFAQFLTSLPSPPLALVSDFFLGFTHRVATATGVRRVVFHGMSCFSMAICKALVTRPPAVASVDLGAPFHVHGMPEHVAITADEVPDVVVKFADMKDPVTRFFIDEVGFSDVLSWGVLVNSVAALDEDYVASLESFYLHPGSRAWVSGPLFLAAGDVSELEEEEDPEGCLAWLDENEKAGQPGPVVYVSFGTQTHFSDAQLDEIAHGLVQSGHPFLWVVRSDTWSPQADVAPHGKIVRRWVPQRSVLAHKAVGGFVSHCGWNSVMESLAAGKPILAWPMIAEQRLNARHVADIVGAGIKVKVLEKPRGTAAVDVVVGRAEVEEKLLLMNE

SEQ ID NO: 21249 - protein, 488 aa, Zea mays
  VARIANT 53: note = Ancestral polymorphism is D, Derived polymorphism is G
MIRRQPGMDRFLQLLAAGVAVLLLVAPPAMADDDIVEVGVNWGSQLSHPLLPGSVVKMLKANRIARVKMFDADSWPVGALVDSGIEVMLGIPNDMLETMSSSYGNAQDWVKENVTAYGDKLKLKYVAVGNEPFLKAYNGSFMKTTFPALKNIQKALDEAGVGNTVKAVVPLNADVYVSPDDKPSSGAFRPDINGLMTDMVKFLHDHGAPFVVNIYPFLSLYQSDNFPFEFAFFDGGKNIQDKGGVTYSNVFDANYDTLVHALKKAGVPDLKVIVGEAGWPTDGNKYANFKLARRFYDGLLRKLAKNEGTPVRKGKMEVYLFGLFDEDMKSIAPGNFERHWGIFTYDGKPKFPIDLTGQGHEKLLSPVTDVKYLPNQWCVFDDGAEDKSKLPSNVQYACASGDCTALGYGCSCNGLDEKSNISYAFNMYFQMQDQDVRACDFEGLAKITDKNASTRGCLFPVQIISASARVAPALLLAALLALLVIVFV

SEQ ID NO: 21250 - protein, 348 aa, Zea mays
  VARIANT 88..348: note = Derived polymorphism lacks residues 88 to 348
MFSWGAQAWRTAAFGLYGFNHFTKSGFLEHAKKFREEDMQIRLDGKNCLVTGANSGIGFATAEGLASHGATVYMVCRNKERGEAALNQIRSKTGNANVHLEICDLSSINQVKSFATKFTSMDKPLHVLVNNAGLLEHKHEITAEGLELNFAVNVAATYTLTELVMPSLEKAAPDARVITVASGGMYTEPLNKDLQAVKGLLQNPLFLYHEMLAREERFTEGTFDGTQQYARNKRVQVALTEWWAEKSGDRGVGFYAMHPGWADTPGVAKSLPGLSERLSGNLRTNDEGADTVVWLALQPKEKLASGAFYFDRAEAPKHLKFAGTADSHAQINPIVDSIRSICGLSVNG

SEQ ID NO: 21251 - protein, 110 aa, Zea mays
  VARIANT 21: note = Ancestral polymorphism is P, Derived polymorphism is L
  VARIANT 38: note = Ancestral polymorphism is P, Derived polymorphism is L
  VARIANT 51: note = Ancestral polymorphism is S, Derived polymorphism is I
  VARIANT 54: note = Ancestral polymorphism is R, Derived polymorphism is C
MASPPPFDLCGDLDDDDIDEPVTAVPKDRRLPIATPTPNVLNDHLLRFTRSLQRPTQNPNPSPNPPPPPPPAVAEEQVEKVKLAGRRLCKLATTTTATQRVDEEEVEWDN

SEQ ID NO: 21252 - protein, 960 aa, Zea mays
  VARIANT 56..960: note = Derived polymorphism lacks residues 56 to 960
MASRHRNASPVTAGKDSPQPASAATSLRLVAEFPLDAPEAKESVTVTVRFRPLSSQEVRLGEEIAWYADGDTIVRSEQNHSIAYAYDRVFGPTTTTRHVYDAAALHVISGAMEGINGTIFAYGVTSSGKTHTMHGDQRSPGIIPLAVKDAFSIIQETPKREFLLRVSYLEIYNEVVNDLLNPSGQNLRIREDLQGTFVEGIKEEVVLSPAHALSLIAAGEEHRHVGSTNFNLLSSRSHTIFTLTIESSGPCSESSEEEAVTFSQLNLIDLAGSESSRAETTGVRRKEGSYINKSLLTLGTVISKLTDGKATHVPFRDSKLTRLLQSSLSGQGRVSLICTVTPASSNSEETRNTLKFAHRAKHIEIQVSQNKIMDEKSLIKKYQNEICQLKEELDQLKRGILSGTPSKDATEDNVILWKQKLEDGNVKLQSRLEQEEAAKAALLARIQRLTKLILVSTKATQTPRLSQCPRPRRRHSFGEEELACLPHRRRDIVLDGESNDLFVAMEGFDETFEVSSKGENKNRKGLLNWFKLRKHDGGSNAPSLGGDQSSLRKALAAPWTPVEIGLNSQTEQEMSNSPENLSANLLSIDHEEFHSDGLYGEEASLVTRKTSDHVDLLREQLKILSEEVALHKSVLKRLVEGAGRSTMNGHVEIEMKKVSDEIKDKQQQIAHLERQIKGELDQLEHTPSHATLLEQVNEKAFELEVKTADNRILQDQLQQKTRECQALEETVAHLHEQLSQALEANDLLSESIIFQQYTDNNLQTGSQIHIENPESIDISDELHQKAEQSEIDELKQRLCELTEAKTQLETHNQKLQEESMYAKGLASAAGVELKALSGEVTKLMNHNERLANDLALARNSTRVRSGHRVGRRDSYTKRLEPASRRDVHASSERESALEVMLMAKDQREAELQKKIEESKQKEAFLEGELANMWVLVAKLKKGQVIDQDDVSMPYPMDRDS

SEQ ID NO: 21253 - protein, 356 aa, Zea mays
  VARIANT 29: note = Ancestral polymorphism is T, Derived polymorphism is M
MEVVNRYVATRHHIEGAPTEADFEVKEEMARWAPDSGEVLVRNLYLSIDPYQLNRMKRSSVTHLAVEGILPGQAASTLLSPSPSVKRITTYAAGEVVASACEEYKAGDKVAGVLGWEDYTLFKPSPAVVMSKVADDAAGFPLSHHINVLGTSGMTAYGGFFEVCKPVKGEKVFVSAASGSVGSLVGQFAKLAGCYVVGCAGTAAKVDLLKGKLGFDDAFNYKEEPDLKSALKRYFPDGIDIYFENVGGEMLEAALANMNPYGRVALSGVISEYTGGARRAVPDLLEVIYKRITIRGFFAYDFLSKFAEFNAVIGGWVRDGKVQVLEDVSDGLESVPSAFAALFRGQNVGKKLVKLA

SEQ ID NO: 21254 - protein, 285 aa, Zea mays
  VARIANT 257..285: note = Derived polymorphism lacks residues 257 to 285
  VARIANT 86..285: note = Derived polymorphism lacks residues 86 to 285
MAPAPASLSAPNALSLPAPARVTSGRWNRSLSVSAAARSVTRVVSVASAAAVTAQRRLVAAAAATEMAPTASGEDGSKPFVEEMREVAMKLHTKDQAREGEKEPQAPPVAKWEPSVEGYLRFLVDSKLVFQTLEAIVERSAVPWYAEFRNTGLERSEALKKDLEWFRQQGHTIPEPSPPGTTYATLLEELSEKDPQAFICHFYNVYFAHTAGGQMIGKKVSEKILDKKELEFYKWEGNLSQLLQNVRNKLNQVASSWSREEKDHCLEETEKSFAYSGGLLRHIFT

SEQ ID NO: 21255 - protein, 301 aa, Zea mays
  VARIANT 189: note = Ancestral polymorphism is P, Derived polymorphism is R
  VARIANT 120: note = Ancestral polymorphism is E, Derived polymorphism is V
  VARIANT 7: note = Ancestral polymorphism is S, Derived polymorphism is Y
MAPAWLSVPSAALSLLDGQRPREWEWLPLRTACPSGGRRVRVPCRRPRTTGFSVAAQRRLVVAAAAMEMTPAAGEKEADAPFTEEMRAAAMRLHSRDQARDGKKEAPLEPPVAKWQTTVEGYLRFLVDSKLVFQTLEAIVDRAVVPWCECSAVLLFSCRVQGYWFSGLERSEPLGRDLEWFRQQGHAVPEPSAPGIAYASFLVELSEKNPPAFVCHFYNVYFAHAAGGRIIGKKVAEKLSLQKELEFYEWEGDLSQLQRNVRSRLNRVASGWSRVEKDRCLGEMEKAFTCSVDLRRHMFPC

SEQ ID NO: 21256 - protein, 108 aa, Zea mays
  VARIANT 10: note = Ancestral polymorphism is D, Derived polymorphism is N
  VARIANT 33: note = Ancestral polymorphism is P, Derived polymorphism is L
  VARIANT 34: note = Ancestral polymorphism is V, Derived polymorphism is I
  VARIANT 35: note = Ancestral polymorphism is T, Derived polymorphism is M
  VARIANT 37: note = Ancestral polymorphism is P, Derived polymorphism is S
  VARIANT 42: note = Ancestral polymorphism is G, Derived polymorphism is R
  VARIANT 48: note = Ancestral polymorphism is A, Derived polymorphism is T
  VARIANT 52: note = Ancestral polymorphism is A, Derived polymorphism is G
  VARIANT 67..108: note = Derived polymorphism lacks residues 67 to 108
  VARIANT 83: note = Ancestral polymorphism is P, Derived polymorphism is L
MLLPPSLELDLFHRAAAAGTGAAAVHFPFGSIPVTHPYYFFGQAVATAAAEAGCHVLKLASAVIVAQSDSDCSSVVDLSPSPPAAVSARKPTVFDLDLNCSPPMEARA

SEQ ID NO: 21257 - protein, 217 aa, Zea mays
  VARIANT 3: note = Ancestral polymorphism is Q, Derived polymorphism is E
MVQSKKKFRGVRQRHWGSWVSEIRHPLLKRRVWLGTFETAEEAARAYDEAAVLMSGRNAKTNFPVPRSGTGELLAPAVPAAREARGGGGGGTSLSQILSAKLRRCCKTPSPSLTCLRLDPEKSHIGVWQKRAGARADSSWVMTVELSKDAPPPPSSGEEPAPSYGGAATTPTSSTVTAGSPPPEMMDDEESVALQMIEELLGSHGMMLQGAAGSLVI

SEQ ID NO: 21258 - protein, 49 aa, Zea mays
  VARIANT 7: note = Ancestral polymorphism is T, Derived polymorphism is I
MVREEITGSTQTLEWKCVESRVDSKRLYYGRFILSPLRKGQADTVGIAL

SEQ ID NO: 21259 - protein, 595 aa, Zea mays
  VARIANT 202: note = Ancestral polymorphism is E, Derived polymorphism is A
  VARIANT 394..595: note = Derived polymorphism lacks residues 394 to 595
MAMIDEPLYPIAVLIDELKNEDIQLRLNSIKKLSTIARALGEERTRKELIPFLSENNDDEDEVLLAMAEELGVFIPYVGGVEHAHVLLPPLETLCTVEETCVRDKAVESLCQIGAQMKENDIVDWFAHVVKRLAVGEWFTARVSSCGLFHIAYPSAPEQLKAELRTIYGQLCQDDMPMVRRAAASNLGKFAATVEQSHLKTEIMSMFDDLTQDDQDSVRLLAVEGCAALGKLLEPQDCAAHILPVIVNFSQDKSWRVRYMVANQLYELCEAVGTEPTRGDLVSAYVRLLCDNEAEVRIAAAGKVTKFCKILNPQIAIEHILPCIKELSSDSSQHVRSALASVIMGMAPVLGKDATLEQLLPIFLSLLKDEFPDVRLNIISKLDQVNQVIGIDLLSQSLLPAIVELSEDRHWRVRLAIIEYIPLLASQLGVGFFDDKLGALCMQWLEDKVFSIRDAGANNLKRLTEEFGPEWAMQHIIPQVSFSTVKNVLEKINNPHYLYRMTTLQAISLLAPVMGPDITCQQLLPVVIASSKDRVPNMKFNVAKVLQSLVPILDQSVVEKTVKPCLVELSEDPDVDVRYYAHQALRACDQMVISS

SEQ ID NO: 21260 - protein, 552 aa, Zea mays
  VARIANT 36: note = Ancestral polymorphism is R, Derived polymorphism is W
  VARIANT 80..552: note = Derived polymorphism lacks residues 80 to 552
  VARIANT 89..552: note = Derived polymorphism lacks residues 89 to 552
  VARIANT 116: note = Ancestral polymorphism is D, Derived polymorphism is Y
  VARIANT 133..552: note = Derived polymorphism lacks residues 133 to 552
  VARIANT 159: note = Ancestral polymorphism is A, Derived polymorphism is V
  VARIANT 162: note = Ancestral polymorphism is C, Derived polymorphism is Y
MTGAAAPAAPPRGGASASQPHAAAPAGKRAGCEPVRKAGPVTMEHVLLALHETEAEREARIRDMFAFFDTAGSGQLDYAQIEAGLAALQVPAECKYARELLRACDRDRDGRVGYDDFRRYMDDKELELYRIFQAIDVEHNGCILPEELWDALIKAVPGAFFCKYSVIHESSRELFQASVKFVYIIYLTSNVSLLSAGIEINDEELARFVEHVDKDNNGIITFEEWRDFLLLYPNEATIENIYHHWERVCLVDIGEQAAIPEGISKHVNASKYLIAGGIAGAASRTATAPLDRLKVIMQVQTTRTSVMHAIKDIWTKGGMLGFFRGNGLNVVKVAPESAIRFYAYEMLKEYIMKRKGENKSEVGASERLIAGGLAGAVAQTAIYPIELVKTRLQTYSGEVGYVPRIGQLSRDILVHEGPRAFYRGLVPSLLGIVPYAGIDLAVYETLKDVSKTYILKDSDPGPLVQLGCGTVSGALGATCVYPLQVIRTRLQAQQANSESAYRGMSDVFWRTLHHEGVSGFYKGILPNLLKVVPAASITYLVYEAMKKNLSLD

SEQ ID NO: 21261 - protein, 276 aa, Zea mays
  VARIANT 229..276: note = Derived polymorphism lacks residues 229 to 276
  VARIANT 152: note = Ancestral polymorphism is G, Derived polymorphism is S
  VARIANT 139: note = Ancestral polymorphism is P, Derived polymorphism is S
  VARIANT 132..276: note = Derived polymorphism lacks residues 132 to 276
  VARIANT 123: note = Ancestral polymorphism is E, Derived polymorphism is V
  VARIANT 111: note = Ancestral polymorphism is K, Derived polymorphism is T
  VARIANT 106..276: note = Derived polymorphism lacks residues 106 to 276
  VARIANT 99: note = Ancestral polymorphism is R, Derived polymorphism is C
  VARIANT 98: note = Ancestral polymorphism is R, Derived polymorphism is C
  VARIANT 83: note = Ancestral polymorphism is A, Derived polymorphism is G
  VARIANT 75..276: note = Derived polymorphism lacks residues 75 to 276
MRKPASTDAATLSSHPLTLRRLARLLALLARPPRPCGSLLPISRRGLHISRSLSLLPAACSVDLVREADADQQPWMPQLLFVACLTIAAKMEETVVLRRLDIHQNQVPSEKYSFDLDAIQRMEIYVLDSLNWRMQVVTPFSYINYFVDKFTGGKPLSCGFISRRTEIVLGSLEATKLLQFRPFEMAAVVLSAAAESQVIAFSGALLASNIPVNKENVRICHEALQEVGLVKKKTDYTASPSRVLDASCFSFKTDDNQTAGSALTVLFASDIRQASI

SEQ ID NO: 21262 - protein, 169 aa, Zea mays
  VARIANT 65..169: note = Derived polymorphism lacks residues 65 to 169
  VARIANT 62: note = Ancestral polymorphism is A, Derived polymorphism is S
  VARIANT 49..169: note = Derived polymorphism lacks residues 49 to 169
  VARIANT 48: note = Ancestral polymorphism is S, Derived polymorphism is Y
  VARIANT 47: note = Ancestral polymorphism is L, Derived polymorphism is H
  VARIANT 38: note = Ancestral polymorphism is R, Derived polymorphism is W
MVTILGSFDNRLSALDAAMRPTQVRTHAIRTAHENIDWTIKAVDDILSQFDLARRSEVLKDAISQIVQDAKKNRKFTETVELQISLKNYDPQKDKRFSGSIKLPHIPRPKMKAEKMGLDYMDVEALKKMNRNKKLVKKLVKKYHAFLASETIIKQIPRLLGPGLNKADK

SEQ ID NO: 21263 - protein, 401 aa, Zea mays
  VARIANT 132..401: note = Derived polymorphism lacks residues 132 to 401
  VARIANT 122: note = Ancestral polymorphism is W, Derived polymorphism is C
  VARIANT 119: note = Ancestral polymorphism is H, Derived polymorphism is Y
MTVVEAGEVLNLKVGENPLLEDEAKTGYVSPDDQDGETASEKPSGAPQLKKGPWSPDEDKLLKNYVEAHGEGKWNKVQRNSGLNRCGKSCRLRWTNHLRPDLKKGSFDNEEIDKILKFYLKWGPKWAKIASRLPGRTDNEIKNFWNTRIKKTEKQGLPIYPEHVLSQVKQPQQDMNCETPGLSHGKKRIREIEIHDLMDVKILFQHLDYHKDLVVPTKPLKRRASIGSLKISGETKETYCSTDLNYVLARSESVPTGSAIASGYPVELPSVQSSSSTLSNDWLLQCVSASVEQQIHSSIQSTETISSQTTGLLPTMSEISFETLIPMVYPMIHSFGYSEHESSPNTDIQAANLSLGSDDVSQYYQVASFFDPGVPDTELGASFFNDTPPETSFLNQQKQVS

SEQ ID NO: 21264 - protein, 77 aa, Zea mays
  VARIANT 7: note = Ancestral polymorphism is P, Derived polymorphism is L
  VARIANT 20: note = Ancestral polymorphism is P, Derived polymorphism is L
MLIPTIPAAAAGAQRRFAAPASTASLNSSTANSRNWSRESSASSSSPAARSAASTQTRGDGEGTQRRTSGTDALSSE

SEQ ID NO: 21265 - protein, 237 aa, Zea mays
  VARIANT 27: note = Ancestral polymorphism is A, Derived polymorphism is V
  VARIANT 28: note = Ancestral polymorphism is A, Derived polymorphism is V
  VARIANT 36: note = Ancestral polymorphism is E, Derived polymorphism is K
  VARIANT 106: note = Ancestral polymorphism is R, Derived polymorphism is C
  VARIANT 113: note = Ancestral polymorphism is M, Derived polymorphism is T
  VARIANT 159: note = Ancestral polymorphism is P, Derived polymorphism is S
  VARIANT 170..237: note = Derived polymorphism lacks residues 170 to 237
MAGAGQRVPEGQISGTDAPGGDAAALAARYAGLGLEKYVMTKLFDRTFGTSTEDAVSDMDILEKIGLLQQFVKPHHLDIPKVLHNEASWLLAVKELQKINSFKAPREKLLCIMSCCQVINNSCELRITHRKVGGPLFTRMDLLKLVLKELKIGTHDILPSNWILARKSAQRSRVRKLQYISELERSVTTLQNLCLIEFYTSSWKRKPHQVIISRNDVSESQFNLVLNIELQQIIDRD

SEQ ID NO: 21266 - protein, 104 aa, Zea mays
  VARIANT 40: note = Ancestral polymorphism is L, Derived polymorphism is P
  VARIANT 56: note = Ancestral polymorphism is R, Derived polymorphism is M
MGNVEATTTSSIVAPELLLGDALLKVAVFAVVQALVYLILRKSSGVFAPAAGMTARSFSFRPMRSMSVRRVLAAFSDVPVGVPESEDRAPSPSPMDPGAEPASE

SEQ ID NO: 21267 - protein, 283 aa, Zea mays
  VARIANT 215: note = Ancestral polymorphism is T, Derived polymorphism is I
  VARIANT 201: note = Ancestral polymorphism is S, Derived polymorphism is F
  VARIANT 198..283: note = Derived polymorphism lacks residues 198 to 283
  VARIANT 192: note = Ancestral polymorphism is I, Derived polymorphism is T
  VARIANT 97: note = Ancestral polymorphism is A, Derived polymorphism is V
  VARIANT 94: note = Ancestral polymorphism is R, Derived polymorphism is S
  VARIANT 85: note = Ancestral polymorphism is M, Derived polymorphism is L
  VARIANT 66: note = Ancestral polymorphism is C, Derived polymorphism is W
  VARIANT 59: note = Ancestral polymorphism is M, Derived polymorphism is I
  VARIANT 55: note = Ancestral polymorphism is P, Derived polymorphism is T
  VARIANT 42: note = Ancestral polymorphism is P, Derived polymorphism is L
  VARIANT 40: note = Ancestral polymorphism is A, Derived polymorphism is T
  VARIANT 37: note = Ancestral polymorphism is D, Derived polymorphism is Y
MANVSQAVAMPSSSRRHGGRHRAEPPSHSPAPSEPRDWTALPQDILITVFLKLGPREIMLGAEFVCTTWRRVAVGEALLWRRIDMISAFYPARRSMARVALDRSAGQCEAFWEFCDSEMLLYLVKSQLVAVLKKLPLLEDLEVSPSLYFCSTETFLEYVFQACPLLRKLRIRFRTGGYYCGDDWMMNEIIGTFTRMSELRSLALLDCDLTAEGLTAILDHSPVLEDLYITGYFDGIMDAELCAKCAKVKKLTLPDISDSDEEESDEEEYYWGVYYENSSDYEF

SEQ ID NO: 21268 - protein, 222 aa, Zea mays
  VARIANT 209: note = Ancestral polymorphism is Y, Derived polymorphism is C
  VARIANT 206: note = Ancestral polymorphism is E, Derived polymorphism is A
  VARIANT 198: note = Ancestral polymorphism is T, Derived polymorphism is N
  VARIANT 197: note = Ancestral polymorphism is L, Derived polymorphism is P
  VARIANT 188: note = Ancestral polymorphism is N, Derived polymorphism is Y
  VARIANT 171..222: note = Derived polymorphism lacks residues 171 to 222
  VARIANT 170: note = Ancestral polymorphism is L, Derived polymorphism is R
  VARIANT 118: note = Ancestral polymorphism is R, Derived polymorphism is W
  VARIANT 115: note = Ancestral polymorphism is L, Derived polymorphism is P
  VARIANT 113: note = Ancestral polymorphism is R, Derived polymorphism is W
  VARIANT 107: note = Ancestral polymorphism is Q, Derived polymorphism is R
  VARIANT 69: note = Ancestral polymorphism is D, Derived polymorphism is G
  VARIANT 62: note = Ancestral polymorphism is S, Derived polymorphism is I
  VARIANT 59: note = Ancestral polymorphism is C, Derived polymorphism is S
  VARIANT 55: note = Ancestral polymorphism is Y, Derived polymorphism is H
  VARIANT 45: note = Ancestral polymorphism is E, Derived polymorphism is G
  VARIANT 30: note = Ancestral polymorphism is A, Derived polymorphism is V
  VARIANT 23: note = Ancestral polymorphism is R, Derived polymorphism is H
  VARIANT 22: note = Ancestral polymorphism is D, Derived polymorphism is Y
  VARIANT 17: note = Ancestral polymorphism is A, Derived polymorphism is V
  VARIANT 15: note = Ancestral polymorphism is A, Derived polymorphism is V
MGIDKISVFHPARRAMARAALDRSAGQCEAFWGSCDNEMLLYLVGRLLIYSVAYYRAPCLKSLRLSTFDGSSQVLVALLKEHPLEDLEVSLSSPIFSTQAFLEYVFQACPLLRKLRIRFCTGEYYYGDDWMRNEIIGTFTRMSVLRFLDLLFYNLTAEGLTDLLDHCPVLEDLYITGCFYGIMDAELYAKCLKVKKLTLPYSYDQAEYYWDKYNEHGSDDEF

SEQ ID NO: 21269 - protein, 150 aa, Zea mays
  VARIANT 48: note = Ancestral polymorphism is E, Derived polymorphism is V
  VARIANT 50: note = Ancestral polymorphism is D, Derived polymorphism is Y
  VARIANT 60: note = Ancestral polymorphism is F, Derived polymorphism is S
MSLEEKNMLRLGLVSLPEEKMHNVLQIVRKRNNNPEMLGDEIELDIDVMDVETQWELDRFVTNFNKALKKSQRAAMINGGVADVTSTAVAEDDTAPVGDVPTLVDNDDAESEEPVKSTTVAEQVDEYVDIGDEMPAATYQSTEIEKDAEG

SEQ ID NO: 21270 - protein, 372 aa, Zea mays
  VARIANT 310..372: note = Derived polymorphism lacks residues 310 to 372
  VARIANT 286..372: note = Derived polymorphism lacks residues 286 to 372
  VARIANT 282: note = Ancestral polymorphism is R, Derived polymorphism is C
  VARIANT 200..372: note = Derived polymorphism lacks residues 200 to 372
  VARIANT 143: note = Ancestral polymorphism is G, Derived polymorphism is R
  VARIANT 26..372: note = Derived polymorphism lacks residues 26 to 372
  VARIANT 12..372: note = Derived polymorphism lacks residues 12 to 372
MKHPLSLPSKPRNPILASDAVFAGKQEEHPAGEELVGVGGRGDGVGVERPELELRGARHATPHLGGIHGCLGVGGASLSLLTSIASAACEKHGGRLEWKAGSIVLLLLLPLASALDRFPYSYGHRLYVLLLARILRLRLHLIGLLILAPRIVAASGPSPTAAHPKVAKYQKKPFPLYYSLESLHEGSVATGDLNFTSTQQMPPPSFIHVRPLTAPPGGPLAAPPCGPLATASASATAHSNRSTSEQSHSPLHPHTNPFSMEWQEISNEAQSRRVEGGNGRKRKQSQIGAAIESFVDFKRSATSKTLEGIEEVSMEKCLDKLDRIDGFTDEDRSYAMEVFESAINREVFMKSKNHNARLLWLKRKIRALATIM

SEQ ID NO: 21271 - protein, 297 aa, Zea mays
  VARIANT 230: note = Ancestral polymorphism is W, Derived polymorphism is S
MLLRSASSPLLNCGRAPAAAASVEHLAVVSPLLSPAVAAPRHGPVLCRAMSEGDLAAPLVPKKDDGHGRAPRLSLSASLSSSASIFVEEEDGEGEEEEDLVAVAGAGVDVPLPLRRLLTNTGLDVSAAAALAFVEQGVGGSGGGGKACGSSGGKGGIGDGDGGSNRAATDAHYRQMIEADPGNSLLLVNYARFLKEVAGDAARAQEYCERAILASPGDAEALSLYAGLVWETSRDAGRAEDYYSRAVQAAPDDCYVLGSYAGFLWDAEEDEEENSEPLPPPSLFQGAAQRPSITAAS

SEQ ID NO: 21272 - protein, 289 aa, Zea mays
  VARIANT 200: note = Ancestral polymorphism is P, Derived polymorphism is S
MAGVIICRSFLLSNFLNTARHRITNRQQVFDLGKYNETCHNIVTKYISEWEAMVTRTRRWIDFKNDYKTMDLNFMESVWWVFAKLWEKDLIYKGVKGHLHTNRVCDNVRTFILTDATFKSTEIEETLSKKRSRLPAPGDADELSVIEDQIAWIVHIIASIVKKSPQRGREATLDVSLKLIKASTSRGLGHLPVIGVVVEPVMVHCTYSSTYNIHGLVTDLSPNFLLHPSCNSTLAEKELLEEEYKKKFDEAKKELSLENDLAGMWILVAKLKIGALDISDLNVDDRTKV

SEQ ID NO: 21273 - protein, 282 aa, Zea mays
  VARIANT 150: note = Ancestral polymorphism is L, Derived polymorphism is R
  VARIANT 211: note = Ancestral polymorphism is L, Derived polymorphism is P
MPPPSLTAAGTTTTTTRRRNDRAAKVHQVLGEGAGTEEMGAVADGWTRPEWCSAAGVAGVLRRHPAPALFGCGLLLFMAVEYTIPMVKPDAPPLDLGFLATAGMHAAIAARPWLNSLLAALNTVFVAMQAAYILWAILAEQRPRAAVAALMMFTCRGVLGCATQLPLPEEFLGSGMDFPVGNVSFFLFFSGHVAGAVIAAADMRREGRLAPARLFDSLNVLQVVRLLACRGHYTIDLAVGVGAGILFDTLSGWYFDAKNGDSSNAPEKQCRSCQCHKALLSH

SEQ ID NO: 21274 - protein, 233 aa, Zea mays
  VARIANT 13..233: note = Derived polymorphism lacks residues 13 to 233
  VARIANT 19: note = Ancestral polymorphism is G, Derived polymorphism is S
  VARIANT 21: note = Ancestral polymorphism is A, Derived polymorphism is V
  VARIANT 28: note = Ancestral polymorphism is P, Derived polymorphism is L
  VARIANT 30: note = Ancestral polymorphism is E, Derived polymorphism is V
  VARIANT 39: note = Ancestral polymorphism is K, Derived polymorphism is E
  VARIANT 63..233: note = Derived polymorphism lacks residues 63 to 233
  VARIANT 73: note = Ancestral polymorphism is K, Derived polymorphism is N
  VARIANT 88: note = Ancestral polymorphism is S, Derived polymorphism is I
  VARIANT 94: note = Ancestral polymorphism is G, Derived polymorphism is S
  VARIANT 126..233: note = Derived polymorphism lacks residues 126 to 233
  VARIANT 146: note = Ancestral polymorphism is D, Derived polymorphism is Y
  VARIANT 150: note = Ancestral polymorphism is T, Derived polymorphism is I
  VARIANT 156: note = Ancestral polymorphism is D, Derived polymorphism is Y
  VARIANT 159: note = Ancestral polymorphism is L, Derived polymorphism is F
  VARIANT 162..233: note = Derived polymorphism lacks residues 162 to 233
  VARIANT 168: note = Ancestral polymorphism is D, Derived polymorphism is V
  VARIANT 169: note = Ancestral polymorphism is T, Derived polymorphism is I
  VARIANT 174..233: note = Derived polymorphism lacks residues 174 to 233
  VARIANT 175: note = Ancestral polymorphism is S, Derived polymorphism is L
  VARIANT 178..233: note = Derived polymorphism lacks residues 178 to 233
  VARIANT 179: note = Ancestral polymorphism is R, Derived polymorphism is G
  VARIANT 194: note = Ancestral polymorphism is G, Derived polymorphism is R
  VARIANT 198..233: note = Derived polymorphism lacks residues 198 to 233
  VARIANT 211: note = Ancestral polymorphism is P, Derived polymorphism is S
  VARIANT 216: note = Ancestral polymorphism is G, Derived polymorphism is V
  VARIANT 219: note = Ancestral polymorphism is Y, Derived polymorphism is N
  VARIANT 225: note = Ancestral polymorphism is P, Derived polymorphism is L
MERIQESEVKEALNRMKGGKAMGPDGIPIEVMDRYKEEKKDLHMVFIDLEKAYDKIPTNLMWWALDMHKVPTKYVTLIKDIYDKVVTSVRTTDGDTNVLSINIGLHQVPVDESRERVNRKLELWRQTLESKGFRISRTKTKYMRCYFGTTISEDGDVRLGDQVVPKKVTFRYLGSMPQGDGDIDEDVSHRIKVGWMKWHQASGVLCNKRVPQKLKGKFYRTTIRPAMLYGAKC

SEQ ID NO: 21275 - protein, 393 aa, Zea mays
  VARIANT 285: note = Ancestral polymorphism is V, Derived polymorphism is G
  VARIANT 56: note = Ancestral polymorphism is L, Derived polymorphism is S
  VARIANT 55: note = Ancestral polymorphism is I, Derived polymorphism is T
  VARIANT 41: note = Ancestral polymorphism is V, Derived polymorphism is A
MAAEASAVQQLAGLLDQVDAPLKKTFELNQHEYGSKDKFTVVKVDGLADSLQNVTLFFDLSHTFGIPGVNSFSYYPREIVFELSHFPFIFQNVHQGYPTETLLRFLKAREWHVNKAHRMLEDSLNWRMQNEIDSILEKPIIPVDLYRSIRDTQLIGLSGYSKEGIPVFAVGVGLSTYDKASVTVNYYVQSHIQINEYRDRFILPTVTKKYGRPITTCIKVLDMTGLKLSALHQMKIVTAISTVDDLNYPEKTETYYIVNAPYIFSACWKVVKPLLQERTRKKVHVLRGCGRDELLQIMDYSSLPHFCRQEGSGSSKHSSGDADNCFSLDHPFHQELYSFIQEQALNQELIKQGSLHVKIPEQDPEDAKIVEVIEAEFHKLGVQNGSANGIDQA

SEQ ID NO: 21276 - protein, 185 aa, Zea mays
  VARIANT 153: note = Ancestral polymorphism is G, Derived polymorphism is R
  VARIANT 134..185: note = Derived polymorphism lacks residues 134 to 185
  VARIANT 53: note = Ancestral polymorphism is R, Derived polymorphism is C
  VARIANT 51..185: note = Derived polymorphism lacks residues 51 to 185
MLFLSQQAGQVYGVPLYGSLLIKPGVYPEQRPCNEDTRRKWIEALAQPNKRLCSLSEHVPHGYRRKSLFEGLIRYNVPLLRATWFIKVTYLNQLQTRQTPNSISVAGSDNQRSQWTKDVVEYLQHMLDEFCSKEGAFVHPSFREQSSPGPTAGTNQIKMKTEASPAVGDIEEHLVHFKWWYMVAK

SEQ ID NO: 21277 - protein, 153 aa, Zea mays
  VARIANT 19: note = Ancestral polymorphism is P, Derived polymorphism is R
  VARIANT 30: note = Ancestral polymorphism is W, Derived polymorphism is R
  VARIANT 32: note = Ancestral polymorphism is T, Derived polymorphism is M
  VARIANT 63: note = Ancestral polymorphism is S, Derived polymorphism is F
MGYKMFGEATESQFTLNLPDNSVISKIAVWTTVANPINTYALTIIPLAMSLEELLPPNQQKYSTIIMLRSSLVISTLLIALSVPFFGLVMALVGSLFAMLVTYILPCACFLAILKTKVGWHQIAACSFIIVVGVCCAYVGTYSSLSKIIQNYA

SEQ ID NO: 21278 - protein, 293 aa, Zea mays
  VARIANT 194: note = Ancestral polymorphism is R, Derived polymorphism is W
MDMQFFPDRAHLRLRSRWHGMYLHAEEDGVRITLRRRRGTLNEAWVVHHLERNGVNYVLLHSAAYGRYLAIVSMEATPAPSSGQGQGARRTCLAVQRLYDAPGQNDVLWQFRFADDGSDDVVMRNRVYGTWHNYGDERRLMQFIVEAIPPRAEPPELPPVVWWSVPRQQPPAVPIGGPIRRQRRRVVQAQPVLRRKIHYVRADDQGNFSPLVWRMLWFDGRSVLHLRRDLAAELGVGEANVLDITMCVRAGSNGRLTPLVIDLPFDEQAMDIVVLATDSPAAEALVHPDVAAP

SEQ ID NO: 21279 - protein, 143 aa, Zea mays
  VARIANT 64: note = Ancestral polymorphism is E, Derived polymorphism is V
MALSLSLARPAPLAVSAGAGARKLPAASLAFPAKSFFGAPLAATAASVASPLPRKPATSTTSLEVVAAGKKGYKMKTHKASAKRFRVTGRGKIVRRCAGKQHLLAKKNTKRKKRLSKMVQVNKSDYDNVTGALPYLKVNRKAN

SEQ ID NO: 21280 - protein, 390 aa, Zea mays
  VARIANT 155..390: note = Derived polymorphism lacks residues 155 to 390
MQVTPAATLRPAAAHALRLSTDHCREGPKIRVRFGSRKLSWTETLDDATSLTRATGRQRRHSSILKVSCWAAAHHQHNSNPQHFKATGIRIAKTLHAFYQFCRPHTIFGTIIGITSVSLLPVKSLDDFTLIAIWGFLEALVAALCMNVYVVGLNQIFDIEIDKVNKPTLPLASGEFSVPTAVVLVVAFLVMSISIGIRSKSAPLMCALLVSFLLGSAYSIDVPLLRWKRHAFLAAFCIIFVRAVVVQLAFFAHMQQHVLKRPLAPTRSVVFATFFMCCFAAVIALFKDIPDVDGDRDFGIQSMTVRLGQQRVHRLCINILMTAYAAAILVGASSTNLYQKIVIVSGHVLLASTLWQRAQQFDIENKDCITQFYMFIWKLFYAEYFLIPFV

SEQ ID NO: 21281 - protein, 600 aa, Zea mays
  VARIANT 484..600: note = Derived polymorphism lacks residues 484 to 600
  VARIANT 421..600: note = Derived polymorphism lacks residues 421 to 600
  VARIANT 401..600: note = Derived polymorphism lacks residues 401 to 600
  VARIANT 351..600: note = Derived polymorphism lacks residues 351 to 600
  VARIANT 350..600: note = Derived polymorphism lacks residues 350 to 600
  VARIANT 336..600: note = Derived polymorphism lacks residues 336 to 600
  VARIANT 278..600: note = Derived polymorphism lacks residues 278 to 600
  VARIANT 227..600: note = Derived polymorphism lacks residues 227 to 600
  VARIANT 177..600: note = Derived polymorphism lacks residues 177 to 600
  VARIANT 109: note = Ancestral polymorphism is C, Derived polymorphism is Y
MTSWPPPSYSAARALHQEEASSAPVPGCAARSGESSRRLAGEVTTVRRRPHAASMPAKSRSDSAWPYAGKGTTRQHVRRKGRRVKLKGGIESPWSHGEPYGNGFSCNYCISRIKGGGATRLREHLGGLPENVAACINVPLNVKAIMTDQVAVRRIRRRQNNDLRHYVEREVRESNKGLGTSSKARIPLDEEGQIQMALRESLREYDEERVIGCSSGSRSASCSANQQTRLDRFYRSPSVSQGPFDMDLAHSRAQAQPRVDIMLRCGSRDNLGKALAKWFHANDIPGRKADCPYFRSTIKLAQECGQGVHIPIGKELDDKFLDMNYEDMEAHMTKFKDDWKEYGVTVMCDSWTDISRFSEVSKVVDDAKRICRFFYNHNRLHAMMREKIGGELIRWNATRRWWSDMELVLNAVTPIYTVLCYADQQKNATIAGFLPKMMTAMAQIHGNLSKEKDLLDRIVGVIKKRLKYMVDDTLIVTGNPIMDWLCNSRSESTPILDEYDDNELESPIPSRVLMDELGMDVEVTTLKRKLDFNTRDGKKKRKARFVDIEEEIEDDVESDSLEGDEFGDEWDFRGPSGGGACEVGASGDGSRDGEWVFHLD

SEQ ID NO: 21282 - protein, 317 aa, Zea mays
  VARIANT 25..317: note = Derived polymorphism lacks residues 25 to 317
  VARIANT 76..317: note = Derived polymorphism lacks residues 76 to 317
  VARIANT 92..317: note = Derived polymorphism lacks residues 92 to 317
  VARIANT 165..317: note = Derived polymorphism lacks residues 165 to 317
  VARIANT 180: note = Ancestral polymorphism is P, Derived polymorphism is L
MAPASSSRAARDPLLFARFDLPAVWGCRKPLDFCREARDTDNAPVASEPDATATPTEGVKDSDGTRSPTRATAMVQQAPVAGEVAQEAPRKQWNLRERTPWQDYSNRADDLRARQARKLGSADAGGNRRLSLSVKLTRQEIDADFAKITGSKAPRRPMKRSKTVQRKIEVRGLTAQAAMPVISIDLLTAVAGYSMTPSEFVSLVGNIDDVDKTMDEINEQTENMKQIQDALSTPLGASADFDEVIHAPIALKKHNELEAELEELEGAELESQLLEPVAALPVHPVHVPGNKQPARPAPQKATAEDDELAALQAEMAL

SEQ ID NO: 21283 - protein, 316 aa, Zea mays
  VARIANT 59: note = Ancestral polymorphism is A, Derived polymorphism is V
MAFNYHDHALAMDPAAAAAVGAAANPSFVSGGGMAGGPGWEREKAAIAAHPLYERLLEAHVACLRVATPVDQLPRIDAQIAARPPPMEAAAAAAAAGGAHSGGEELDLFMTHYVLLLCSFKEQLQQHVRVHAMEAVMACWELEQTLQSLTGASPGEGTGATMSDDEDNQVDSESNMFDGNEGSDGMGFGPLMLTEGERSLVERVRQELKHELKQGYRDKLVDIREEILRKRRAGKLPGDTASTLKAWWQAHSKWPYPTEEDKARLVQETGLQLKQINNWFINQRKRNWHNNSASSSSDKSKRKRNTAGDGNAEPAW

SEQ ID NO: 21284 - protein, 213 aa, Zea mays
  VARIANT 152..213: note = Derived polymorphism lacks residues 152 to 213
  VARIANT 172: note = Ancestral polymorphism is P, Derived polymorphism is L
MTLDAHYLRGSMAAIYSLLKHASCPESLFFHFMPATQLMEDCVTSPDVNVEVGSYVNTNDVFKEPNDVFKEPGSNKRFLELGSTLEPGKPVKADKVAILSDATLMVIQLRSEAQQLKETNGSLEENIKELKAEKDELRDEKQKLKLENESLEHQMKLMTSTPTYMPHPTLMPVPFPQAPLAPFHAQGQATWQKLMMPFVSYPGYPMWQFMPPS

SEQ ID NO: 21285 - protein, 288 aa, Zea mays
  VARIANT 140..288: note = Derived polymorphism lacks residues 140 to 288
  VARIANT 37: note = Ancestral polymorphism is G, Derived polymorphism is R
MEFFPDRAHLRLRNPVNSAYLYAMEDGVGITLRRRSGTRNEAWAVHRVELNGANYVLLHSAAYGRYLAIVCEEAAPAPSSGQGAGASHICRVVQRAYDAPGQDDVLWEVRCVDDGSGEVQMRNPTYGATGYYDGQKKWMRVMVEAIPPRADPPEHPLPVISWMRWQQQFPIVGRLRRQCQGVQGQPVLRRRIYYVRADDQGNFNSDAWRMLWFLDRSVWHLRRDLAAQVGVGEANALDITLCVRAGSNGRLTPLVIDLPSDEQAMHVVVLNTDSPAAEALVHPDVGAP

SEQ ID NO: 21286 - protein, 102 aa, Zea mays
  VARIANT 65: note = Ancestral polymorphism is G, Derived polymorphism is R
  VARIANT 62: note = Ancestral polymorphism is P, Derived polymorphism is S
  VARIANT 58: note = Ancestral polymorphism is W, Derived polymorphism is L
MGELVLRSMHQHLLQVHKRQHNGPSIDRLMDPMRVKGVIDHVIEPEVAGVQCRLGRGWWGRPGDRSHNRFRPPPAALQRRGARGGPVGPRTGDETCSTTTRA

SEQ ID NO: 21287 - protein, 142 aa, Zea mays
  VARIANT 39: note = Ancestral polymorphism is S, Derived polymorphism is A
MGRVRTKTVKKTSRQVIEKYYSRMTLDFHTNKKVLEEVSILPSKRLRNKVAGFSTHLMRRIQRGPVRGISLKLQEEERERRMDFVPEKSALEVEEIRVDKETMEMLAALGMADLPGVERQAEVSNAPAYGRPQYGGPRRDRV

SEQ ID NO: 21288 - protein, 130 aa, Zea mays
  VARIANT 89: note = Ancestral polymorphism is W, Derived polymorphism is L
MWYVLLKEKNMLMTQRQMLQSDGFPNPERISKVKKSMCRIKHVLTERAIAEPDPRRSSEMKRMINAVLFRDDADHRRAPPRRRRGWWRWCRRRRRRADPGVPAPPHHQGRGWSGGGASRPDGHGSHPLRS

SEQ ID NO: 21289 - protein, 180 aa, Zea mays
  VARIANT 143: note = Ancestral polymorphism is S, Derived polymorphism is F
  VARIANT 106: note = Ancestral polymorphism is A, Derived polymorphism is G
  VARIANT 103: note = Ancestral polymorphism is A, Derived polymorphism is T
  VARIANT 98: note = Ancestral polymorphism is S, Derived polymorphism is A
MVHSLCMVKLFLVVVNTTINSMSSDSSICLQSRRKTREPKEENVTLGPTVREGEFVFGVAHIFASFNDTFIHVTDLSGRETLVRITGGMKVKADRDESSPYAAMLAAQDVAQRCKELGITALHIKLRATGGNKTKTPGPGAQSALRALARSGMKIGRIEDVTPVPTDSTRRKGGRRGRRL

SEQ ID NO: 21290 - protein, 721 aa, Zea mays
  VARIANT 287..721: note = Derived polymorphism lacks residues 287 to 721
MAASHGAGSLKSTSINGVKLYSLTGGRYVAPWVVAKKKRALRKDKEYQRRLDLIHDLRFETATTKIKLTPDDQYLIASGIYPPQVKVYELKELSMKFERHMISEIVDFQILGDDYSKLAFLCADRSVNLHAKYGSHYSLRIPRVGRDMAYDCWSCDLLCAASSPDLYRINLEQGRFLASLSSESPAINAVTRSKIHGLVACGGEDGAVECFDMRKKTSVGRINIPAVSSEDYSQEVTSLQFDEDQGYFMAVGTSTGKISIYDLRMSSPLRVKDHMYGSPILNIKWHQTLNSTEPKLITADKHIVRIWDPNTGNNMTSIEPDGGAINDVCVFRNSGLVLLALDNSQIPAHFIPALGPAPKWCSHLDNLTEEMEEKPDTTLFDEYKFLTKEEMERLNLTQYIGSSAVRAYLHGFIVRYELYKKQRAAVAPVEYETIKDEIKKKKLEAQRKSRITQVVKIPKVNRQIMDSIREDEIDLDMENVDKSSIKKKKRKLELNKAILDDDRFKEMFENKDFEIDEESKEYLALHPQAATKEPRLIEEHFDSVSEDDQQSDGNTSDTLAESDSDDVMHNSKRIRLYEVKDEHHAEAFLNSVSLSNEDAAPLEDRIAALERKQNSKALDAVKYGPGGSREISFFSKSRRRHKEESSSDDEPKGVKKRAVQPLGLKQGKAEFYMFGGNRGRGRGGSGRGRSGRGRGGGGGGGGRGGGRGGGGRGGGRGRGRG

SEQ ID NO: 21291 - protein, 139 aa, Zea mays
  VARIANT 20..139: note = Derived polymorphism lacks residues 20 to 139
  VARIANT 25..139: note = Derived polymorphism lacks residues 25 to 139
  VARIANT 59..139: note = Derived polymorphism lacks residues 59 to 139
MAGFGGGSRDSASGFGGGFWERRARRIMPCPVPACAAAGGRALGRGVSARGRGWGWRGREVEARRISGLGGGTSALGVGTCCRDGAVMVGLGARRGSGMGRWCLRTGRRRSGTGMAMAGRAEGSAGMARGSAGMEGVLL

SEQ ID NO: 21292 - protein, 69 aa, Zea mays
  VARIANT 32: note = Ancestral polymorphism is K, Derived polymorphism is N
  VARIANT 5: note = Ancestral polymorphism is G, Derived polymorphism is D
  VARIANT 4: note = Ancestral polymorphism is R, Derived polymorphism is H
MSGRGKGGKGLGKGGALRYRKVLRDNIQGITNPAIRRLARQGRREAHLRAHLRGDPRRPQDLPGAMLLV

SEQ ID NO: 21293 - protein, 664 aa, Zea mays
  VARIANT 108..664: note = Derived polymorphism lacks residues 108 to 664
MASEIEVLEDTTTSSTSLVAAASTVPSLAEGAEAPAEDDSLKNDVYTAAAYGDLEKLQRLVEGEGRPVTEPDGGGYHALQWAALNNRVAAAQYILELRAECFAVVVGLEFRSWFMWRDLDWLDINAVDHTGQTALHWSAVRGHIQVAELLLKEGAKVDATDLYGYQATHVAAQYGQTAFIYHIVAKWNADPDIPDNDGRSPLHWAAYKGFADSIRLLLFLDAYRGRQDKEGMCCTPLHWAAIRGNLEACTVLVQVGKKDDLMVKDKTGLTPAQLAADKNHRQVAFFLDNARRVHGKGCGANTRFGKLSKLGLAPLLWCTIIGMLITYTHSVISGQYAMTTTAPFGIFAWSGVFLATAGLVMFYKCSRKDPGYININARGSQNQRDDEPLLKMELENPALLSGNWSQLCITCKIVRPVRSKHCSTCDRCVEQFDHHCPWVSNCIGKKNKWEFFMFLTLEVFAMIITGSAAIIRIVRDPNSPSSFGAWIHYSAFQHPGVVSFLALDCFLFFGVAVLTVVQASQIARNITTNEMANSMRYAYLRGPGGRFRNPYDHGIRKNCSDFLLNGYNEDTERLEQTLPTDEEMGMIQMTSAVSQQNGDNHLHHGNGTDHSCAVSQANSKPHSQVGSSQCCDHSKRTDRTPLGLGLGLGRNSASRQYVRSLIPL

SEQ ID NO: 21294 - protein, 517 aa, Zea mays
  VARIANT 461..517: note = Derived polymorphism lacks residues 461 to 517
  VARIANT 414..517: note = Derived polymorphism lacks residues 414 to 517
  VARIANT 134..517: note = Derived polymorphism lacks residues 134 to 517
  VARIANT 61..517: note = Derived polymorphism lacks residues 61 to 517
  VARIANT 12: note = Ancestral polymorphism is C, Derived polymorphism is Y
MSKKHAIQCKYCDKVIHGGITRVKYHLANIGGFNVTKCKKVPAHVKQEMEALLTKKTGEKEQRKKEKQRERDEIDLDKSDGSDEEENEHENDVIVLKSTRESNNCSSSRPPTNGGSGTIDNFYKPQSVEESVHKNKIQTKLSTQKREDRRDRASGIAHNTLTLPSFGHMLEAIGAFGRGLRGPSAYEMSGPFLKRAKQKPLANVLRRMDSDVPAMGFFHGCMLEAKKEIATRFDNNESKYRAAWDIIDKRWDNKLKTPLHLAGYYLNPYFYYPNKSSIELDGSFRAAVISCITKMFDDEDTQDSIIEELNIYQDQQGAFGHDIAVRQRRNKTFNPAKWWMNHGTTTPHLRILATRILNLTCSSSGCERAWSVFEQIHTKKRNKLLHDRMRDLVFVKFNSKLREKRDNKIKDPIEKELNDILEDDGNEFITGVVPDENVDQDEDQEGAHDEPSPEPTISKTQLPAKRKRHGRPRKKKLRSLKSLLSGDLERATCASSSESEDNESMQIEASNSDSGDE

SEQ ID NO: 21295 - protein, 225 aa, Zea mays
  VARIANT 189: note = Ancestral polymorphism is K, Derived polymorphism is E
  VARIANT 77: note = Ancestral polymorphism is R, Derived polymorphism is K
  VARIANT 28: note = Ancestral polymorphism is A, Derived polymorphism is V
MAASSLCHGHLLLFLLVSVTSACLGTAAAHQAGSGEGYTIAGRVKIDGMSEKGYGLPAKTSNTKVILNGGQRVTFARPDGYFAFHNVPAGTHLIEVSSIGYFFSPVRVDISARNPGYIQAALTETRRVLNELVLEPLKEEQYYEVREPFSIMSLLKSPMGLMVGFMVLMVFVMPKMMENIGIFHLFYIEWIQAFSYYVSLKLATSKQQLLRAVLHDTMVEFSSIY

SEQ ID NO: 21296 - protein, 476 aa, Zea mays
  VARIANT 23: note = Ancestral polymorphism is S, Derived polymorphism is C
  VARIANT 81: note = Ancestral polymorphism is G, Derived polymorphism is E
MRGWGLLVLSLHVLSCLVSGVASGRTSSYVRTEFPSTDIPLESEWFAIPKGYNAPQQVHITQGDYDGKAVIVSWVTPEEPGPSEVFYGKEKLYDQKAEGTTTNYTFYDYKSGYIHHCLVDGLEYNTKYYYKIGSGNSAREFWFETPPAIDPDASYTFGIIGDLGQTFNSLSTLQHYEKTGGQTVLFVGDLSYADRYEHNDGIRWDSWGRFVEHSTAYQPWIWNTGNHEIEYRPDLGETSVFKPYLHRYMTPYLASKSSSPMWYAVRRASAHIIVLSSYSPFVKYTPQWLWLKNEFKRVDREKTPWLIVLMHSPMYNSNEAHYMEGESMRAAFEKWFVKYKVDLVFAGHVHAYERSYRISNVNYNITSGNRYPVPDKSAPVYITVGDGGNQEGLASRFYNPQPDYSAFREASYGHSVLQLKNRTHAIYQWNRNDDGNPVPADTVMFHNQYWTSSTRRRRLKKNHLHLEDLEDLISLL

SEQ ID NO: 21297 - protein, 304 aa, Zea mays
  VARIANT 253: note = Ancestral polymorphism is P, Derived polymorphism is S
  VARIANT 23: note = Ancestral polymorphism is V, Derived polymorphism is G
MEASSKKLQAFILTLLLVLSTAVTPILSLSVPDDEVACDCDKPKAPKPSHPPKTKPSHPSPSPKPKNPKPPKGSTGYPAPGHQPPKSPSYPPVVGPPKGPVTRPPVMRPPVVGPPKGPVTRPPVTRPPVVGPPVTYPPITGPPTTPPVVGPPVTYPPITGPPTTPPVVGPPVTYPPITGPPATTPPVTGPPVTYPPGGGGGSSTPCPPPPSPTPTPSSPTCPADSLKLGACVDLLGGLVHIGLGDPVVNKCCPVLEGLVELEAAVCLCTTIKLRLLNINLYLPLALQLLLTCGKTPPPGYTCTV

SEQ ID NO: 21298 - protein, 183 aa, Zea mays
  VARIANT 154: note = Ancestral polymorphism is G, Derived polymorphism is D
  VARIANT 121..183: note = Derived polymorphism lacks residues 121 to 183
  VARIANT 72..183: note = Derived polymorphism lacks residues 72 to 183
  VARIANT 34: note = Ancestral polymorphism is R, Derived polymorphism is S
  VARIANT 29: note = Ancestral polymorphism is R, Derived polymorphism is W
MCGGISVEVRDAGSLMSDPWIFNSSGRARLRGVRRRTWQRGGRECGARFRGGSEEEDWTGLVVDKDEMDRSWVYNSVPFSEPYMLGVEQFMAHVKSRFSAHEKIKCPCRKCLNLIEKSQDEVQKDIEINGISRCYTRWVYHGEGDIDVQEDDDGTLVVGYEYMSWDEITRLHLMMKDKLKMSF

SEQ ID NO: 21299 - protein, 204 aa, Zea mays
  VARIANT 85..204: note = Derived polymorphism lacks residues 85 to 204
  VARIANT 52: note = Ancestral polymorphism is R, Derived polymorphism is S
  VARIANT 36..204: note = Derived polymorphism lacks residues 36 to 204
  VARIANT 26: note = Ancestral polymorphism is R, Derived polymorphism is C
  VARIANT 8: note = Ancestral polymorphism is M, Derived polymorphism is T
  VARIANT 5: note = Ancestral polymorphism is E, Derived polymorphism is D
  VARIANT 2: note = Ancestral polymorphism is G, Derived polymorphism is R
MGNPEKLMNQIFDLKFTSKSLQRQARKCEKEEKEQKLKVKKAIEKGNMDGARIYAENAIRKRTEHMNYLRLASRLDAVVARLDTQAKMQVIGKSMQSIVKSLDSSLATGNLQKMSETMDNFERQFVNMEVQAEFMEGAMAGSTSLSTPETEVNSLMQQVADDYGLEVSVGLPQAAAHAIPAAKDKEKVDEDDLSRRLAELKARG

SEQ ID NO: 21300 - protein, 283 aa, Zea mays
  VARIANT 40: note = Ancestral polymorphism is V, Derived polymorphism is A
  VARIANT 43: note = Ancestral polymorphism is V, Derived polymorphism is L
  VARIANT 48..283: note = Derived polymorphism lacks residues 48 to 283
  VARIANT 81..283: note = Derived polymorphism lacks residues 81 to 283
  VARIANT 109: note = Ancestral polymorphism is V, Derived polymorphism is L
  VARIANT 111: note = Ancestral polymorphism is D, Derived polymorphism is G
  VARIANT 131: note = Ancestral polymorphism is T, Derived polymorphism is A
  VARIANT 198: note = Ancestral polymorphism is S, Derived polymorphism is F
  VARIANT 246: note = Ancestral polymorphism is G, Derived polymorphism is S
MEHHDDELWEELIRQCLQKLEMVRNLLEHTVGNLDPLYIVSLVPDGLEITRYASIKIYRKKTIVGFMEQHDDELWEELTRQCLQKLEMVRNLLEHTVGNLDPLYIVSLVPDGLEITRLRNRLVKIMAGYRTETSLRNGCIDMLKDVIDGDLYEQYPSLPADMQRKIVDELDRTLKPAALLGSVLKVWEECNMITVAFSVFAGVGERTREGNDLYKEIIESVVIKLGDKQSERKCALVYGQMNVPPGARVGLTGLTVAKHFRDAEGQDVLLFIDNIFRLTQGTL

SEQ ID NO: 21301 - protein, 230 aa, Zea mays
  VARIANT 150: note = Ancestral polymorphism is P, Derived polymorphism is R
MSIFEYNGSAVVAMVGKNCFAIASDRRLGVQLQTIATDFQRVFKVHDKLYIGLSGLATDAQTLYQRLVFRHKLYQLREERDMKPETFASLVSALLYEKRFGPYFCQPVIAGLGDDNVPFICTMDCLGAKVLVKAIFSANESCATSSSKLPWKCHWELAKDFVVSGTASESLYGACESMYKPNMEPDELFETVSQALNSSIDRDCLSGWGGYVLIVTPTEVREHVIKSRMD

SEQ ID NO: 21302 - protein, 479 aa, Zea mays
  VARIANT 176: note = Ancestral polymorphism is G, Derived polymorphism is E
  VARIANT 294: note = Ancestral polymorphism is P, Derived polymorphism is H
  VARIANT 295: note = Ancestral polymorphism is D, Derived polymorphism is V
MACVPSVTTTFPVRRGERQLVSPARPTPYEFKMLSDIDDQDVLRFYRSGAFFYRSSASKAGLDPAKVIRSALSEALVHFYPLAGRFRELRPTRKLVVECTGEGVVFVEADADVRMDDLGDSLAPPVPCSDKLLCEPESPTADVIDRPLLYVQVTRLTCGGFVFGFQICHCIADGTGIVQFLTTLTEFARGVPGAPTVRPVWERELFTASWPPEVSHDHLEYAPLPERPAAGKDHRVNPSDGDDVFDHHAFFFGPAEIAAIRSQAPPALRSAASRFDLVGAFMWRCRAAALQFDPDDSVRLHIFVNARVRNRSRRPVPAGYYGNAFAFASASAPAGELCRRPFRYALQLLAEAKARASREGYVQSVAGFNAARRRPPFPKARTYLISDVTNAGLLAVDFGWGRPVYGGPATIMLASFHQEGRNEAGEPGILVPIRLPASAMERLKQNVRKELAGAHVDDVETAADETNSNMHGGGVLAKL

SEQ ID NO: 21303 - protein, 180 aa, Zea mays
  VARIANT 149: note = Ancestral polymorphism is G, Derived polymorphism is E
  VARIANT 27: note = Ancestral polymorphism is L, Derived polymorphism is H
MASAEAPLLHIAAEVLPLLASAAVLFLAVAITYGHLTVMGRHVAAVPVAGAGNARRSVSGLLIFVLCVSAGTLELIVFGTTKAAGGGAADHGAQARALGLPDDPPALLAAATGTFFSGMTLIIVAHRRAGGGEGGGGGAVVAGDGPIQELLRLLITKVAAGAAAALVGLMVMALTLYRAK

SEQ ID NO: 21304 - protein, 72 aa, Zea mays
  VARIANT 57: note = Ancestral polymorphism is V, Derived polymorphism is A
  VARIANT 48: note = Ancestral polymorphism is M, Derived polymorphism is T
  VARIANT 46: note = Ancestral polymorphism is R, Derived polymorphism is Q
  VARIANT 33: note = Ancestral polymorphism is K, Derived polymorphism is N
MEAFLEKKTRGEESMDRCIRIFEAMEDLTDEEKAIAAEVFENELNRETFLKLTIHNVRLIWLRRKISRITST

SEQ ID NO: 21305 - protein, 189 aa, Zea mays
  VARIANT 153..189: note = Derived polymorphism lacks residues 153 to 189
  VARIANT 148: note = Ancestral polymorphism is W, Derived polymorphism is G
  VARIANT 68: note = Ancestral polymorphism is G, Derived polymorphism is R
  VARIANT 57: note = Ancestral polymorphism is D, Derived polymorphism is G
  VARIANT 32: note = Ancestral polymorphism is R, Derived polymorphism is C
  VARIANT 30: note = Ancestral polymorphism is C, Derived polymorphism is S
  VARIANT 29: note = Ancestral polymorphism is I, Derived polymorphism is T
MFMPFLVSTLQMGDVLIPSLQCGNLFVTICVRVSRFWDFSDPQDDARLLHCDMVLLDEEMYDGLCLTGSSPCKWYINPSIPEAEPLMSSARGDHKPVKWNATITSSQLISPVAEEQKVSYIKYLHPFENKGKEFLVTVTIRKIDSKWWYNSCRKCACIAVPHGDSYKCTNRDCANIDMPVQRLDDVSSG

SEQ ID NO: 21306 - protein, 453 aa, Zea mays
  VARIANT 8: note = Ancestral polymorphism is K, Derived polymorphism is N
  VARIANT 38..453: note = Derived polymorphism lacks residues 38 to 453
  VARIANT 81: note = Ancestral polymorphism is L, Derived polymorphism is P
MDDIVSVKTNKDKILFMINNISISNMEAKAKEFNKVIQEQYYPWFAQYMVMKRASIEPNFHDLYLKFFDKVNSKSLNKEILKATYENCKNSRRWLPHFFCNAKLISAIDKLGKEKEGFIHHCTEAFVQLVASLVPGILDTVSSDIQQVMVGKRHGPVTALAGRAHPKSTIYMFPVILHLMGSASFKHRVVTGHVLLQLANLIKILEAPFQNLTVDIKDVKPTSLLKDRLREVEGNPDFSNKDVTASQTPVVAEVPSGTIPSLTHMEQQPEINITSRAMSLPNILNQYAAPGRLPTNSTVEDDKVALIMPEQVPSLTQVLPAQTQSTSPSPFSVNQLMAAIPREEIRFKINPKLGSLGPQLQYSKIMDLALDKANREIILPVIQRSVTIASRTTKELILKEPLRVALYSNLRNLIQNLMSDSETIEQLIHTLINENLDLGCAIIEAVATHQVAS

SEQ ID NO: 21307 - protein, 95 aa, Zea mays
  VARIANT 14: note = Ancestral polymorphism is I, Derived polymorphism is N
  VARIANT 5..95: note = Derived polymorphism lacks residues 5 to 95
MAPKRTTFSVVLLIAIAVAVASMLSAHATRTLRQEDVNLPVRVASSSSPTTCVTFFDDAPAEEMEADGPSPAAPGPDDAWNYDDDKTPITGPLLL

SEQ ID NO: 21308 - protein, 630 aa, Zea mays
  VARIANT 237: note = Ancestral polymorphism is W, Derived polymorphism is C
  VARIANT 235: note = Ancestral polymorphism is D, Derived polymorphism is N
  VARIANT 223..630: note = Derived polymorphism lacks residues 223 to 630
MASSDSNPTDAFEYMLLEKDPDLYRTVFSGPSQTSPWINPSVLKLKHRIGRGPFGDVWIATHHQRTEDFDQYHEVAVKMLHPIKEDQLQIFSARFHEIFSKCQGLGNVCFLHGISTQNGRICIAMKFYEGSIGNKMARLKGGKLPLSEVLRYGADLARGVLGLHTRGILILNMKPCNFLIDENDCAVLGDFGIPSLLFGLSLPNPDLIQRLGTPNYMAPEQWQPNIRGPISYETDSWGFACSVLEMLTGIQPWRGKSADEIYQLVVLKKEKPIFPCSLPPDIENVLSGCFEYDFRNRPLMKDILHAFESAKGADHDNIGWGNSENAMVDRITMPNRINWLHFKDKLQVGDKVRSRKLKNSCGPETMEIPDGTIVGIEDDGERDAYVLVRVHALHNPLKVRFSTVERVTYGFAAGDWVRLREEDKKRSQVGILHSIDRDGAVAVGLIGVDTPWKGNYSDLQMAEAYCVGQFVRLKASISSPRFEWQRKRGGLASTGRISQIHPNGLLVVKFPGKFNLGEVCSCLADPSEVEVVSFDKCEGIVKKYEHLEDFHWAVRPLFVAIGFLTAIKLGVFVGKSISRPRSRKVASISDQSGDYQQQHQQQVVQQSANAAWLPPPVANMFFGDSVGTSG

SEQ ID NO: 21309 - protein, 108 aa, Zea mays
  VARIANT 91: note = Ancestral polymorphism is T, Derived polymorphism is I
  VARIANT 77: note = Ancestral polymorphism is D, Derived polymorphism is Y
  VARIANT 67..108: note = Derived polymorphism lacks residues 67 to 108
  VARIANT 64: note = Ancestral polymorphism is T, Derived polymorphism is I
  VARIANT 38: note = Ancestral polymorphism is Y, Derived polymorphism is H
  VARIANT 35: note = Ancestral polymorphism is T, Derived polymorphism is M
  VARIANT 27: note = Ancestral polymorphism is F, Derived polymorphism is S
  VARIANT 26: note = Ancestral polymorphism is C, Derived polymorphism is F
  VARIANT 25: note = Ancestral polymorphism is V, Derived polymorphism is I
  VARIANT 16: note = Ancestral polymorphism is A, Derived polymorphism is T
  VARIANT 15: note = Ancestral polymorphism is A, Derived polymorphism is T
MPLPPSLELDLFHRAAAVVTGAIVVCFPFGSIPVTHPYYFFGQAAAAATAEAGCRVLKLAPTVTVAQSGSDCSSVVDLSPSPPTAMSARKTAVFDLDLNCSPPMEAVA

SEQ ID NO: 21310 - protein, 393 aa, Zea mays
  VARIANT 252..393: note = Derived polymorphism lacks residues 252 to 393
MAATRRAFFHSAVDGIARAGPGEAELLPAPPQVGRPVEGASSMVFGFPVPRPTMPDSRPAAVTQQFFPPTTTAAQQATMEEQCHVPAGSAAEQWVRSSASRKSRRGPRSRSSQYRGVTFYRRTGRWESHIWDCGKQVYLGGFDTAQAAARAYDQAAIKFRGLNADINFTLDDYKDEMKKMKDLSKEEFVLVLRRQGAGFVRGSSRFRGVTQHKCGKWEARIGQLMGKKYVYLGLYDTETEAAQAYDKAAIKCYGKEAVTNFDAQSYDKELQSQPWDGELDLELGLGCASSDPSTVAVEAFSPATSSSSRKQRTMTLTLGLPEEEEETGAGYPHSSSSRRPPAPAAGMFGRPADDHVHVAPPSHRQWQQQGRHAAPDGTPLDRSYHHWSIRFDP

SEQ ID NO: 21311 - protein, 182 aa, Zea mays
  VARIANT 26: note = Ancestral polymorphism is L, Derived polymorphism is P
MVDVFTAFGFVNLCLAFTFLQISTFPDPQLAADSTMASAEAPLPSAAVLFLAAVPVAGAGNGRRRSISGLLIFVLCVSAGTLELIVFGKAAVGGTAEARALGLPDLPALPAAATATFFSGMTLVIVAAHRRAGGEDEGGGGGAVAGDGRPTQGLLRLTAGAAAAALVGLMAMPLIVILYGAK

SEQ ID NO: 21312 - protein, 296 aa, Zea mays
  VARIANT 221..296: note = Derived polymorphism lacks residues 221 to 296
MSIHGLILEVRVTGCRKLRDTEFFTRQDPYVVVEYATTKLRTRTCTDGGRNPTFDEKFHIPLIEGLRELNVIVWNSNTLTHDDFIGSGRVYLHKVLTNGYDDSSWPLQTRHMRSAGEVKLIMHVDVSAMKNKMGRSVAASSAHPVPALSMPAPSPTPAPAPSPASAATPAPAPALASAIPYTGVSPSYPPVSAYPGATAYPAYPTSSHAPYTTAEYPPPPQQPYQPPPAGYPPSYPPQPYEQSYPPQPYEGSYPPQPYERSYPPQPYGQQPYPPPPAAESPYPPAPYPGTYPPRPY

SEQ ID NO: 21313 - protein, 319 aa, Zea mays
  VARIANT 241..319: note = Derived polymorphism lacks residues 241 to 319
MRSLHLSPAPPRPPLPTLRRRPAPKPHFSAPSRGAAVGGTSFYSAGRISLPRHLAAAAPEAGAAASGPPDPSPLSAEAEAERAKLAQVSKKLEKTARHFKNVGTLGFWSQLVCTVVSAGILSFSAVATGNVTAPFTFSATAVGIVVAFICVFRSFGYIRLSERLKRTANDPSKAPPRADVVNNLRNSIVLNVVGMAAAVLGLQATVGALVGKALTTSLVPYYQGIPPGQSPVLALDIFLVQSRYFITDTRTLIVFLPFYSYHLQASANTILSHFLGLSSSLELLRSVTLSQTEAAPVPKPPLRSVTLSQTEAAPVPKTA

SEQ ID NO: 21314 - protein, 304 aa, Zea mays
  VARIANT 19: note = Ancestral polymorphism is D, Derived polymorphism is G
  VARIANT 27: note = Ancestral polymorphism is E, Derived polymorphism is G
MGSEADCDRIRGPWSPEEDDALRRLVERHGARNWTAIGREIPGRSGKSCRLRWCNQLSPQVERRPFTAEEDAAIVRAHARLGNRWAAIARLLPGRTDNAVKNHWNCSLKRKLAAASAPAGSSDVEARPTKRVSLSPDSPSGSGSGSGSGSGSGSGSDRSDLSHGAGQVYRPVARSGGFEPADCAMSRPLEEEEEEKEDPLTSLSLSLPGTDQRFHHDRAHSQFQELPASPPSPSPPPPPVLSAYPFSPVFMEAMQELIRTEVQRYMASVGVRAGCGAAGGADLCMPQLVDGVMRAAAERVGRMQ

SEQ ID NO: 21315 - protein, 173 aa, Zea mays
  VARIANT 16: note = Ancestral polymorphism is G, Derived polymorphism is C
  VARIANT 28: note = Ancestral polymorphism is V, Derived polymorphism is I
  VARIANT 30: note = Ancestral polymorphism is P, Derived polymorphism is L
  VARIANT 93: note = Ancestral polymorphism is S, Derived polymorphism is F
  VARIANT 162: note = Ancestral polymorphism is D, Derived polymorphism is V
MDLSSRWAEPLKEAEGEVDQWMAYWCRISPACLLRVAVCAAAGAAALAGSADGNRDGLHPLGLSIDQQTHLVKICSQVDLCNFDGTHGVKFSSDDAKEVVHYQTISPKSLAKSVLEEGGWSNFMCSREDTQNNVDVAIVFIGSKLQSSDISKDKQVDPALADTLKVIIDTHLS

SEQ ID NO: 21316 - protein, 53 aa, Zea mays
  VARIANT 52..53: note = Derived polymorphism lacks residues 52 to 53
  VARIANT 40..53: note = Derived polymorphism lacks residues 40 to 53
  VARIANT 25: note = Ancestral polymorphism is L, Derived polymorphism is S
  VARIANT 18: note = Ancestral polymorphism is L, Derived polymorphism is P
  VARIANT 16: note = Ancestral polymorphism is R, Derived polymorphism is I
  VARIANT 15: note = Ancestral polymorphism is C, Derived polymorphism is Y
  VARIANT 7: note = Ancestral polymorphism is V, Derived polymorphism is A
  VARIANT 6: note = Ancestral polymorphism is R, Derived polymorphism is Q
MMETSRVTIIEFLCCRMLHDGNRTLIRRRDFACLKNLRCCTCWLNAFLIWNWE

SEQ ID NO: 21317 - protein, 231 aa, Zea mays
  VARIANT 124: note = Ancestral polymorphism is A, Derived polymorphism is V
  VARIANT 94: note = Ancestral polymorphism is A, Derived polymorphism is V
  VARIANT 82: note = Ancestral polymorphism is W, Derived polymorphism is C
  VARIANT 65: note = Ancestral polymorphism is E, Derived polymorphism is D
  VARIANT 46: note = Ancestral polymorphism is K, Derived polymorphism is M
MANLSITNILEKMTRKDKDYRYMATSDLLSELNKESFKADQDLEPKLTITVLQQLEDASREMFLENGVALLGDVRNSWVGVWILQALFVKEHNAVCDAIKEEHPNLSDKELYRYARLVTSVVIAKVHTLDWTVELLKTKTMRARMRANCIDIGELVGLKGEEQLSKIGFEKKILSMGYQACGALELWNYPSFFTDLIPQNLDRTNRSERIDLAALEGMKFGPNLYHISRGS

SEQ ID NO: 21318 - protein, 121 aa, Zea mays
  VARIANT 7: note = Ancestral polymorphism is P, Derived polymorphism is L
  VARIANT 10: note = Ancestral polymorphism is R, Derived polymorphism is Q
  VARIANT 19: note = Ancestral polymorphism is R, Derived polymorphism is Q
  VARIANT 20: note = Ancestral polymorphism is H, Derived polymorphism is Q
  VARIANT 31: note = Ancestral polymorphism is A, Derived polymorphism is V
  VARIANT 33..121: note = Derived polymorphism lacks residues 33 to 121
  VARIANT 41: note = Ancestral polymorphism is R, Derived polymorphism is H
  VARIANT 51: note = Ancestral polymorphism is K, Derived polymorphism is M
  VARIANT 54: note = Ancestral polymorphism is D, Derived polymorphism is N
  VARIANT 59: note = Ancestral polymorphism is G, Derived polymorphism is D
  VARIANT 60: note = Ancestral polymorphism is G, Derived polymorphism is D
  VARIANT 61..121: note = Derived polymorphism lacks residues 61 to 121
  VARIANT 66: note = Ancestral polymorphism is R, Derived polymorphism is H
  VARIANT 67: note = Ancestral polymorphism is R, Derived polymorphism is Q
  VARIANT 70: note = Ancestral polymorphism is A, Derived polymorphism is V
  VARIANT 75: note = Ancestral polymorphism is E, Derived polymorphism is G
  VARIANT 86: note = Ancestral polymorphism is A, Derived polymorphism is V
  VARIANT 92: note = Ancestral polymorphism is G, Derived polymorphism is S
  VARIANT 98..121: note = Derived polymorphism lacks residues 98 to 121
MGVSPSPLSQTADTRRFPRHQEVLRYIQAFARRFQLDGIIRLCTEVLAVSKDNDEGSSGGWMVRWRRNVVGDESEQEQEGEEVFDAVVVCNGHYTEPRTAADSIPGLDAWPPGKQMRGQRR
